United States Patent Application Publication US 2020/0329713 A1 - sequence listing, part 10

SEQ ID NO: 3 - DNA, 6122757 bp, Bacillus thuringiensis (residues 4,081,839-6,122,757 of 6,122,757)
catagaatacatcattttaactagatttattattaactaaattgtccccaccaccaagctctgcctcaatctgcgaagttttcgatgactcatccatacgccaatacgtaataaagcttatcgcgatacatccagctacgtagaagtagaatagtgattccataccaatactttttagccataatgcgatgaactcagctgttccgccaaatatcgcaactgttagtgcatatggtaaacctacgccaagtgcgcgaatttcagttgggaagagttctgcttttacaattgcgttaatcgaagtgtaaccagtaacgataatgagaccgaccatcatgagtaaaaatgctacgattggttctgtcgttttttccatgaagaagaagattggtgctgttagtaatgttccgagaataccgaatgccattaatagtgggcgacgtccgattttatcggatagtagcccagcaattggttgaagtacgacgaaaataagtagtgcggcaaagttaatccagcttacaacttctttcggcagaccgactgtgtttaccatgaacttttgtaaatatgttgtgtacgtataaaatgcgacagtgcctccgagtgttaggccaactactgttaatactgctttcgggtgtttcataagagcgcgaacggttcctgcgctttcgcgtttttgcgattttatgtttgaaaactgctctgattcatccatcgtgcggcgaagccataatacagctactgcgcccatcgctccaataatgaatggaatacgccagccccaagctttcatatcgggttcgcttagtaattgctgaagaacaatttgaacgcctaacgcaaccatttgtccggcaacgagcgtgacatactggaagcttgaataaaagccgcggcgtccactactagccatttcagataaatatgttgcggaagttccgtactctccgccgagtgataatccttgtagtaaacgggcaagaactaaaataattggtgccataataccgatgctttcgtaactaggtgtacaggcgataatgaaagaaccaccggccataaccgtaatcgaaagcgttaatgctgcccggcgtccgtgccgatctgcatagcgtcccattaataaacttccgatagggcgcattaaaaacccaactgcgaaaatagctgctgtgttgagtaactgactcgttggatctcctttaggaaagaactctgctgagaagtaaacagcgaaagcagagtaaacgtaccaatcgtaccattcaattaaattgccgacagaacctttgaaaatattgccggcgactcgattagattttgcttgagccatactaattcctcctcttgcttagtaataaaaggtatatatgaaagcgtgttcattgtatttgaattgtactgttctttattagaaatctcaatattatgacaattttattctttttgtactttatgtacatggagagttttaatagttgcttcattttcagttttgtcataataatagaaaaaggagattgatagttttgaatattttatcaaaggatatgaagcatgaaaaaatcacgcaaagtgtcattacaaacgaaaatagtaagcttaattatcgcgttaattgtatttgtcgttctcctactaacaggaatatttgtttacattcagtccgttgatacgaagcaccaagtggaacagttagcactgcaaacggctaaatctctttctttcatgccagctataaaagatgcttttcaaaataaagaacataaaagtacgatccaatccattgcggaacaagttcgtgagcaagctgatgcagattatatcattatagaagatcgctttggggtgatgtattcccattcaaattcggaattaattggcacaaagagtaacaacccgtataactatgaggcacttacttttggtggctattatacactcgaaggaaatggtacaagtggtcctgctttaatggcgaaagcacccattattgttcgtaatggagattacgaacaagtagtaggcgttgtgacagtagagtttttaataaaaggtattgaatctaacatactgagcagaacgaaagaaattatactcttttccttagctgtattagtagtcggaattattggcggcattcttttagcacgtagcattcgtaaagacacactcggtttagagccaaatgaaattgcagcgttataccgtgaaagaagtgcgatattactatctataaaagaaggaattatagctattgatcaaaacggttttattacgatgatgaacacctcggcagaagaaatgctacatgtaaattgtgattatatgcagcaacacatttcaaaagttttaccagaatttaatatggaaagagtgctagaaaacgatcaagaaatcgcgtttcaagataaagtgtttattttaaatatgacaccgatacttgaaaataacagtacggtaggaatggtatgtagttttagagataaaacagaactgcaaaaccttgtgaacacaatatctgaggtaagaaagtattctgaggacttacgcgctcaaacacatgaatttacaaataagcttttcgttttatcaggattacttcagttaggacattacaaagaggcgattgaatttatccagcaagaatctaatattcatcaaagccaaaatcatattttattccatcaaattcatgatgcaaaagtacaagcaattttattagggaaaatcggaacagcatctgagaagaaaattgattttcatattgaaggagatagtgcgcttcatccgttaccagaccatataaaggtgtcgcacctcattacgatccttggaaacataatcgataatgcgtttgatgtggtgagtgggcaagaggagaagagagtttccttcttcgttacggatataggacacgatattgtatttgaagtgatagatagtgggataggaataccggtagaaaaaattacgaccatttttcaaaaaggattttcaacgaaaggaaatgatcgtggttacggattagcgaatgtgaaagaaatggtagatctactagagggaacaattgaaattcaaaacgagaaaaatgggggagcgatttttacaatttaccttccgaaaacattgagagaaagtacatgacaaacagggggatgggcatatgttgaaggttgcaattgcagaagatgatttccgcgtcgcgcaaattcaagaggagtttttattaaaaataaaggacgtaaaagtaatcggaaaagcattaaatgcaaaagaaacgatagaactactacaaaaggaagaaatcgatttacttctattagataattacttaccagatggaattggaactgacttattaccacaaattcatgctgactttccaagcgttgacgtcattatggtaacggcggcaaatgaaaaccatatgttagaaaaagcaattcgaaacggcgtaagtaactaccttataaaaccggtcacgttagaaaaattcgttcgtacaattgaagactataaaagaaagaagcaactattacatagtaacaatgaagtaaatcaagcactcatcgataacttcttcgggacttcgcaaacacaagacataaaaaacttaccgactggtgttgatccgttaacattgcaaaaagtgaaaggaattataaaaggattcgacgagggcattacaatagaagaaatgggagaacaaatgggggcctccagaacaaccgcaagaagatatttagaatacttagtagcgacaaacgaatgcacagtagaatacacatacggcattatcggacgaccagaacgaaagtatcgaataggacgaggactatgaaaaaacgattattactatgtatatggatcatgacaggagtaatagcgggatgttcctcggagagatcccatacgaataaaatgagcatcgacaaagtagaaatcgttgcgccgaacgttcaaggagcaggctgggacttaacagcgcgggcgatgcaaaaaacgctcacagaagaaaaaatcttcacaaaaccaatcacagttacaaacaaagtaggtggcagtggtgatgtcggatggaaatatacgaaacaaaaaggcggtcacgtactggcgattaactcaagcttactcataacgaacaacctactaggccacagtaaactaacatataaagacttcacgccactcgcaacattagcatcggactgggaagttgttgtcgtatcaaaagactcaaacatagaaaacgcaaacgaactaatgaaacaactaaaacaaaacaagaaaaacttcaaaatcggagttgcccccggcctaggaaacgacgatcacctatcattcgtacaagtaagcaaagcattcggcataaaccctgccaaactacaattcttcgtctacgaaaacaaagaaaaaatcataaatgccctaacgaacaaacaaatcagcgccgcaaccatgaccctatccgaagccgaaaaacaatacaaagccggaaaaataaaaatactagccgtatccgcaccaaaacgactagaccgactaccagaaatcccaacatggaaagaacaaggaatcaacgtcatcttccagcactggaaaggaattatgggcccaaaagatatgacggaggaagaggttgcttattgggatggtgttattaagaggatggttgagagtgatagttggaaggggattttgagggagcggggttgggagagtttttataaggggagtggggagagtagggggtttttggaggaatgtgattttaggtatgaggaaatgttgaaaaaagaggtttaagagggaaggagtcaatcgggctttatttttgtagttacttctatataatataaaagagatgagagtcttaggctaattacattaaaagggctacatagggatagataaaatctagcttactgattaaaaatatattagtcgttaaaagatataaaaggcatttttcagtctataaagtgtggaaacataaagtatagagtttctgtgagatttaaggaggacataatgaagaaaaatatttatgttgttggagcagtaattgttcaagatgagaaaattttatgtgcacaaagaggaccatctaaatcgctacctcttatgtgggaatttccaggtgggaaaatagaagagggagaaacacctcaagaggcgttaaagcgtgaaattgatgaagaaatgcattgtagcgtgcagattggtgagcaaattgattatacagcctatgagtatgattttggtattgttcatttgaaaactttctattgtaaacttgttgaaggaagtccggttctaactgagcacgtagcaattaaatggttatatccgaatgaactagcagctttagagtgggcacctgcggatatcccgactattgagaaattatcaaaagaatcgattgtaaagtaatttgaaaaaaactattcgttttatgcggatagtttttttattgtaataaatttgcactttaaatcagtgagtaatacaattaatataaaaaattgtcataaatggtgatcatatggagaatttcattcaaaagttagaggggtctttatataaagggtttattgatcaaaaacataatcatcctggaatatataagcctaaattattagtaaacaatacgaagaaaaatgaaaatgttttaagctcattgctggaagagcttgaaaatagtacagcctttattttctcggtggcttttattacggaaagtgggctagcgactttaaagtcacatttccttgatcttaaacaaaaaggagttaaaggacgtatattaacatctacattcttaaattttaatacaccaaaagtgtttagagaattaatgaaacttgaaaatgtagaagtaagattaacaaacttatctggttttcattcaaagggatacatatttgataacaaaacacattgttcattaatagttggtagttcaaatctgactgcacatgctttgaaggtaaactatgaatggaacgtcaagttaacatcgcatgaagatggagagattgttcaacattttaaaaatcaatttgaagaagtttgggagcattctcaagtattaactgaagagttaattggaaattacgaaacaatatatgaacaagttgcagaaaataagttactagatcgagttatagaattacctggtcaatatcataattcaattgaagaagctttgaaaattaccccaaataaaatgcaacaagctgcgttaaaagaaatacaaactattcgagacgctggaaaagaaaaaggattagttatctctgcaacaggaacggggaagacatatctttcagcatttgatgtcagaagttttgcacctaaacggatgctatttattgttcaccgagagcaaatattaaataaagcaaaatcagattctcaaaaggttcttggtggagtagatgaggattttggaattttatcaggatcaaataggcaaataaatgctaaatatttatttgcgacaatccagactatttcaaaggaagaaaatttacatcaatttgatcctgggttatttgattatattttaatagatgaagttcataaagctggtgctagttcttatcatagagtcattgattattttaaaccgaaatttttaatgggaatgaccgctacacctgaacgtacagacaattttaatatttatgagctatttgattacaacattgcttatgaaattcgattgcaagaagcacttgaagaagatatgctttgtccttttcattattttggagttattgattttgaatataatggtgaaaagatagatgacactactgttttatctaagcttgttacggaagaacgagtggatcatatagttgaaaaagtaaaatattacggtttttctggtaagaaagtaacaggactaatgttttgcagccgaaaagatgaggcagaacaattatcacatgccttaaataatagaggttttcgcacatttgcattaaccggcgatcattcccaagaggaaagagaactgcgggtgaatcaattagaaaatggcatactggattatattttaacagtagatatttttaatgaaggtattgatattccgagtgtgaaccaagttgttatgttgagacaaactcaatcaagcattatctttatacagcagttagggcgtggacttcgaaaacacgattcgaaagattttgttacgattattgattttattggaaactataaaaataactatttaattccgattgccctttcaggagatagatcacaaaataaagataatatacgtagatatacaaatgacacgagttatattaaaggtatttcaacagttaactttgaagagatagcgaaaaagcagatctttaaagcgattaacaatagtaatttaacagcaatgaaagtattgaaggaagcttttgctgagttgaaaaatagaataggaagaactccatatctatatgactttatagtaaaccattctattgatccagttgtacttgcagaaggatattcgaactattatcagttcttattgaaaatgaaagaagatgtccctgtattaacagagtacgaaaataaagttttaacgatgttttcattggaagtattgaatggaaaacgtaaaaacgaaatcgttttgttagacttattattaaagcaagaaaaagttgataaggatgagtatataaaacaacttgaagaatctaattgcttaacagatgatgaaacgattacttcagtacaacgaatttttgaattagagtttttctcacaaaacagtcaaaagaaatatggagaaaagccaattctctctttacaggacgataagatgtatatgtttaatgattctatccgaaaaagcttagaacaaaatcaatactttaagcgtatggttatggacattattaaaagtgcaaggaaaaagagcaaaaactatgagtgtgatagtaaccttactgtatataaaaaatactcaagaaaagatgtgtgtaaacttttaaattggcataatgacgagagctcaactatgtatggttataagacaaagtactatacttgtccaatatttatcacataccataaaaatgatgaggtagaatccagtgtggactacggtgatgaattccttaatcaagatgttcttaaatggtatacaagaagtaatagaacattaaaatcaaaggaagttcaaacaattattgatgctaaagaaaataatattgacgtccatatttttgtgaaaaaagatgatgacgagggaagcgacttttactatttaggaaaagcgacacctgataaagcaagtgtagaacaaactgaaatgaaagataaaaatggaaaagaactacctgttgttacgatgaatatgattatggagaaatcaattgataataagatctatgattatataaaggacggtaatgttttgtaggtatattaaatttttaatatctttatgtttctaaaattattaagcgaatatagatggggctgtatcaaaatgacatcggagtatgcttttgatatggtcttttttattggaatttaatatgttttttattagatttgtggattcatttaattggtttaagcagaatgtggagatgagtctttctaatcgaagtaaccgataactagcccctcctaagccccttacaagccccttacaagcccctaccaagtaataaatcactaagaaaaaacataacaaaaacaactacaacaacaaacaccgtagtagtagtcaaaaaaaatttgaaataacacgccaaaaaccctgccatcctcccatatatattatgaaggggcttttacttttgaacggagacgggaggaactttgatggcggtgtatcgtactgtgcaggtgaatttttggcaagatgattttgttttggatttgacgccggaggagcggtatttttatgtttatttgttaacttgttcgaagacgacgcagtgtgggatttttccttttccgaagcggttagctgagatggagacgggttataacagggagactgttgataagcttgtgcagcgttttgttgattatgggaagattctttatgatgcggatacgcgggagttattcgttttgaattggcttcgttataatcctgtgacgaatacgaatgtggagaagtgtgtgcttcgtgagctgaagggtgtgaagaataaggagtttgtacatatgtttcttcagaagtgcatagaggaggagctgaatgttccgatgcttttagcgcatttcggcatgcctggtgatgtggctgtggatgatgttgagccggtttgtgaggagatagaggaagaaacgggaagtcgcgtgttttctttttatgagcaacatttcggtagtttgtctccttttgcggtggaggaactgagtgcgtggatggaagatttgtcagaggagcttgtgctgaaggcgcttcaaattgcgtttgagaataataagcggacgattgcttatgtgaagggcattttgagagggtggcacgggaaagggtttacgaaattgtgtgaggttgaggcagatacggctaagtttcggaagaaggagttgtctgttagtacgggggagacggaggagtttttggcgaggtgtgaggagtgggagaagaatgcgccatctgaggaagagttgcagcgctttttagcggagcgcgggtggcggccatgagtattcaaaatgtggaggcggaaaagacggtgttaggttctctattgcttgctggagagcttattaaggagtgccgtttgacggagcagtatttttcgatgccggtgcataagtctatatttcagttaatgcgaaagatggaaggagaggggcaaccgattgatcttgtgacgttcatttctagggtaaatccgaagtttttagaggggatcgggggaatggagtattttatagggttaatggatggtgtgcctacaactgccaacttctcttattatgaggggcttgttcgaggtgcctggaaaatgtatcaggcgggtgttcttgggcacaagatgggagagcgtcttattgcggagaagagtgagaaagttatcggtgagacgattacggcactttgtgaattagaggagaaagactctgtatgtgagtttgatttgaaggatgcgttagttgatttgtatgaggagcttcatcaagatgtgaaagagattactggtattgagactggttatacatcgttaaataaaatgacgtgcggattgcaggaaggtgattttgtcgtccttggtgcgcgtccttctatggggaagactgcgtttgcgctaaatgttggactacatgcggcgaagtctggatcggcggttggattgttttcattagagatgagtagtaagcaattgttaaaaaggatggcgtcttgcgtaggtgaagtgtcaggaggtaggctgaaaaatccgaagcatcgttttgcaatggaggactgggaaaaggtgagtaaggcgtttgcggagattggtgagttaccgcttgaaatttacgatcatgcaggtgttacggtgcaagatatttggatgcaaactcgtaagttaaagaggaagcacggtgataagaaggttttagttattgtagattacttgcagcttattacgggtgatccgaagcataaaggtaatcgatttcaagagattagtgaaatttctcgtaagcttaaggtattagcacgtgaattaaatgtttgtgtagtagcgttgtcgcaattgtctcgttccgtagaagcacgtcaagataagcgtcctcttttatctgatttaagagagacaggacaaattgagcaagatgcggatgtcattatgcttatgtatcgagaggattattatgataaggaaacggtgcagaaagagatgacggagattcatgtggcgaagcatcggaatgggcctgtggggagttttaagctgaggtttatgaaggagtttgggcggtttgtggaggggatgaattcttgagcactttatatgattgttggtggtatgatatccctgattacggcccggattgttgaacaagaattacaagggtgatacatgccaaagatgtatcaccttttattttttatgacgttttagatattgataatttgtaataaagtttgagcaaatgtcctatattgataggcaggatttttactttttcagcaagcgggttatttgttgaatagttcaatacctattattttgttgcggtgaatatactggagggtatgttaagactttcattaggataggagtgaataagtaattatgaaaaaagcgatacgcgtccttatttctggtgcgagcattaccggtccggcactcgcttactggcttcatcgttatggcttcgacgtgactgtagtagaacgcgcacctgcattgcgctctggtggatatggggttgatattcgtggtgtagctgttacggtgcttggacagatgggtatactcgatcaagtccgtgcagctgatacaaacatgaccggtgtgtacttcgtgaacagcaaaggtgatgttgaaggtcaattaagtgaagcgagtttcgcgaaccagcatggtgtggacatcgaaatcatgcgtgatgatttgagtaatattttgtacgatttaactaaggatacaattaagtacatttggagtgagtcaattactgctatacatgaaactgaagatggtgtagaagtccaatttattcatgaaaagccacagacgtttgatctggtcatcggtgcggacgggctgcattctaatgtgaggtccctgacttttggtgatgaagcacagtttaaacgtacacttggttgttatatttcgattttcaccctcgagaattacctcaatcttgaccaccgcgtaatgctgtatacaatgccaggtaaaactgtgggtatgtatagcgctcgtggtaatacagaggcaaaaggtatgctcctgttccaatcagaggcactggagtacgaccgctatgatgaagaatctcaaagaaaacttgtagaaaatgcctttgtaggccatacagaagactgggaaacttcacacatacttaaaactatgaaagaggcggatgacttttactttgatgagatttgtcaaattcacatgccaacatggtcaaaaggtcgaattacattggtaggtgatgcggcgtatggtccatcacctctatcagggcaaggtactagtctagcgcttgtcggagcttatgtattagcaggcgaacttaaaaacgcgcatggtgatcattcccgtgcctatgttgcttatgagcaagagatgaggggatttgttgagaagaatcaaaaaataggaaaactagctgctgggagcatggttgaaaaatcgagctttaaaatctttctgcgcaatttcatgttacgagtaccaatccttatggtcttccagtttaaggtaatctcgaaaatggtagcgaaagccgctaacgggatcgagctaaaagactattaatatgaatatgtaagaaaagagtattgtctccatgatttatattaccgaacaagattgattgtaataactgtttctggttaaaagaatgaaaaattaataaatataaatgaaaaaattattggataggggaagtttatgggaaatcactcgaataagtcagatgaagaactggaacggttatattatgaagggaatacacgtgcaagtcgagatgcagaaaataaattatacgacagaggatatacactagattctaatagtgatacatgggatttagcatcaaatcaaaatgatactcattcagtagggattccaatacctactggacaaggaacattccttctgtttttagctattttaataggcggtttaatcgcttttttcatcggtggatttctcgttattgcgtatgcggttgaatatgctacatatatttatgtgggctttgttatatcatttgtactcatgtatgtaacgaaaggtaattctagatttatgagttttttattttatttagggtgtttagctctagccactaggttatttacaaatgttattgaactgtttgaaaatgtagattacgtcacttttataatgcgagatacggatggattaggcgttattattaaatatggaattatatatattatatacgcagctgttattcccttattgttaatgaaggtaataacagcaattgtaagaaaaacaaatttaaaatctaataataaaaattctacattaaatatttaaaaaagaggtgtcacatagttataaggtgacacctcttttatttgatctaagagagacgggacaaattgagcaagatgcggatgtcattatgcttatgtatcgcgaggattattacgataaggaaacgaagcagaaagagatgacggagattcatgtggcgaagcatcggaatgggcctgtggggagttttaagctgaggtttatgaaggagtttggacggtttgtggaggggaaatagtgaaaagactggagtatcactttgcaaataaaataaagcataagtgttctatttcattcgcttatgctttattttttgaatatgttcctcatttccccataaagaaagactttctctctgcagtaatccattgctgcaagtcatcttggctacgtcggacaagtcgatttactaaaacatcatgccatacataatcctctaataagtatatatgaacggggtcatctgtataaaaagcaatattacgctcttcaagtgatggtccataaatcatctctttagaatctatcgatacaataaaccaatgttctgtagacaaggtttctgtataaggtgttatgcgatgggcttctagatttttaatgggatcttcaacatgtagggtaataccttgtattgtaactttatcagctacttcagatagatcttcttttaacgcttcatacatctcatcccacattgaaatgacaatacgtcgttctgctttttttattaatgtctgacagtagctaatgattgtttgattgtcttttaaagtaattactcgattatccgttttttcctcggaagtttctagtttttttaatgaatcacttattccttcgtaagtagattgccattctgtttgcgccttctgtaaaaagatttcaacaggtagaggtgaatagcgggtggtgtcatttatttcttctttcatgacaattcctttttctacaaggttacctaaaatctcataaattcgcgctcttgggacacccgaatctttactcacttgataggctgtgacaggcccctgtttaacaagagatacataagatttagcttcatattcattgaaaccaatttttttaagctgttgcactatgtagtccacttttttcgtcctccgatgtttgcttttatattttaacgttacaataactatttacatttagcaaattattagttactattcgaatagtgactaaaggggaggttaatagtatggatttttatttagacccatccgtattaatgattttgattgtttttgggtttgtggctgcatttattgattcagttgtaggcggtggtggattgattgccttaccagctttattgtttacagggctgaatccagcaagtgcagtagctacgaataaactagcatcgacaatgggaagtgcaactagtaatattgtgttttatcgttctggtaatcttgatttgaaatcggcgtttaaattagttccgctcactttcataggttccataataggggcatggactgttcatttaatgaatccagaagtattgaagccattaatgctgatcatgcttggtgcggtcgctatttatacgatattcaaaaaggattggggtagtatttccactcataaaaaattgtctggtcgacacgtcattatttttactttttttgtttttgctattggtttttatgatggatttctaggtcctggaacaggttcatttttaatgttttctcttttatttattgggtatgattttttaaaagcagcaggtaatgcgaagcttcttaatttaggaagtaatgttggtgcattgttgatgtttatgtatgtagggcaagtcaactatgcgtatggttttataatgggaattgctcaaattgctggagggattgttggctccaaattcgctataaaaaaagggagcgggtatgttcgtgcccttttcattacagtaacttgtttattgttagcgaaaaatctgtatgactatattcaataagtaattaaagaacgtagaaaaggtcaagtatgcaaactacatcgagtataagaagatactaaggagagattccttttaacattttttagatgctaccttgtttgaagatagcatctaaaaagaaaatctaagtgaagagaatgaaaataatataaactcatatttttctggggtatgtttattgattctattgaaatgtttactctatattcttcttataattaggcctcaacaaactcttaaaatccaactcagcaattaacacactcaataatataagcgtagcccctaagtatccttttcctgtcagcgtttcacctgtgaaaacgaaagcaaagcctgcggaaaagacaggttctaatgaaaaaataagacctgtatgggtaggtgtagtgtattgctgggcgataacttgcacgatgaatgcgactgcggtgcaaaatatacttaaggctaggatgattagccatgagttggttgtgctaggcagttttggcgtttcgataatgaatgaaaaaataagactaaataggccgacgaagccgagttgtatgactccaagtgcaatggagtttacatgttttgttacacttccagtaatgatgacgtggatcgcataaaacagtgcagacagtatgcaaaatatatcgccgttaccgattttgaattcgctcgttaatgttaataagccgattcctattatcgttaaaatgatccctactatcactttcttttccggaatgtgttttaaaaatatagctgataatattggaatgaaaatgactgtgagacatagtaggaaaccagcattagaaacactcgtatactttgtaccgaaagtcgcgaaaatgtaaacgataaataagacagaagcgagtataaatgcatattttacagttttaaaatcgatcttaaataaatgtttgtaaaatattaaacctgataaaagaaaagcgataataaatcgtaatgcgattaaattatattcttctatgccatcaagtccaagttttgtaagtaggatggatgcaccccaaaaaaatgtaactagtagtaacattaaatccgcttttaattgtagtttcatttctattccctcgttatgtataaattttataagcccatacccctatccccattattcattttaatattaattctgaatatttgtaacttaaatttatcgacgttttattccataaaaaaagaggctgtttataaaacagcctctatgtatctgaaaatccgaaccttgactaaagactacgtacaatctccaacccttttcttgttaaatgaatccctgctctacctttttttatttccacataacctttcatcttcaggaagttcaatcggtgtctaacctgtgcctcagttaatttcatttcgacttcttggctcttttcagaaataattcttcttccgattgcttttcctttttcttcataattcatgataagggtaaggatgaaaagtgattcttgatcaagagcgtttgaatttgaagaaaagggtttaatattttctgcctgatcgctatttgttttcttatgtggaggcttttgaaaataatgttgattaggcaaatcattttttgttatttggtttccggtacggacagcaagcatgtaatctatcgtatttttaagttctcttacatttccgtaccatggatatccttgcagttcttcaattagttcttgttcaattttgactttagggtccgatagtgtgacaaaatgtttagctaataattcaatgtcatttcggcgtgtccttaattcggggaggtgtataaagagtactttaagcctatggtataaatcttctctaaacatattttcttgaatcattttcagtagatccttattggttgctgcaataatccggacgtctattgggataatttggcttccgccaacgcgcataatctctttttcctgcaatactcgaaggagtcgtgcttgaagtttcaggctaatatctccaatctcatctaaaaaaatagtgccaccatttgcttgttcaaatagtcccattttcccgcccttttttgctccggtaaacgctccgtcttcataaccaaataattcactctcgactaaatcatccgataaagcactgaagttaacagcaagaaaagggccgctatttcgctgggaagcattatgaatagcacttgcaaataactcttttccggtaccactctcaccctcaattaatacagttaaatcagtcttagctaaccttttggcaatttgtttcgtgtcttggatcgtagagctaatcccaacgatgttatgaaaattgtattttgctacataaccttttttgacaaattcttttcttaatttacgttcaaacccgatggtcttaagggcatttctaaaagtaacaataatcgattgatcatttatatgtaggcgttctactattacatccgagccgtttacaacaaatattccgctttcttgttgcttattcaaaaggatgaagtttactaaatcgatattatcaataatggcatcaatcggatgaccaatagcatttttactttttattttcagcatgctttccagaaattcattaaagacaacaattcttccttcataatcaatagctagtatgccatcaccaacaccatcaataacttgatgaagttgtcgatgagctttagctaaattctttgttaaatctactatttttcgatagtatctctcagaaacgtggttacctgattcctccattaaatgaaatcgatctagaatggacatgattgtagtaatatctattaatctgtgaccaatattaattactttttctacaaaatcagggataatttcaagttcgccaggtgtgattgcgagcttgatcatttgtatattcgtttttccaggatagtatggaaaatattcaatgtggtttagccccaattgacgcatcgtttcaattgattcgtatactgtttcatgattatcattcacatatagggcttgtgttccttctggtaaaaataaaagctggtccacgttttcataatttaatgttcgttttgctattattacttcgcagttttccccaataaagtctttcaccgtttctatcgtaaatgtattaggtaacacaattaatgtagaatgaaatacttttggaatactttcttctacagaaaaactttcgatatctatgagatcatctaccatctccgttagttgttgatgtagggcttttcgtgtttcttttaaaacggtgatcaatacaatgtggttggtttcaaatttgttcatagagcacctctttagttgaatggaattggtctaaagttggttattaattggtcattatgtaaccaattaataaccaattataatacatttcagcatagtaaacaccgataaaacgacaaaatatttaaaaatatgtaaataatcactttaatttcgatgttggcacgatatttgcttatatcaatggtgtgtaaagaaataatgaaatgagtagagtcataatttacatatttaattctttaccacttgctagaaaagggaggttaagagtatacaatttcagcagagaaagacaacgaaaccatttaaattatgaggtgagagaaaatgaaaccactaattggtgttacggggtattatgttgatcatagtgaaatagggaaggagggcttacgagggctgccaggtcaagatatggctatcttttcttacgactacatccgttcacttcaacgagcaggtgcaacggttgttctacttccaattgaggaagttgatcaaattgagtccacacttaatcaattagatggattgttattggctggtggcgcggacatcaatccagtttattacggtgatattccaaaatcatatataggtactgtagaggaagaacgagataattttgaattaaatttggcaaagcaggctttagaaaaagatattcctattctaggaatttgccgaggattacaggtattaaatgttgcagctggtggatctctttatcaagacttagagcacgagatggggccagaatatttccatgtccgagaacagttccgtaaatggcaaggctctcattcagtagatcttctggaagagggaaaaatttatgaggctattggccaaaaatctttaatggttaattcttttcaccatcaagcagtgaaaacattagggaaagattttgaggcgagtgcatggtcctttgatggtgtaatagaggctattgaatcgaaggctcatcgttatgtagcagcggttcaatggcatccagaaatgatgtcggaaagggatgtcttgcagcaacgtttatttaaccaatttgtaaatgaaattagtaaaaaggtagttaaatcatagcgtgttataaataagagaattggtggatagcttggtacgtcatggtagtggggaaaccagactgctggctgtctgtaaaagtaataatcagtgggggatgaacgaaccccccactgattaaagtttcattctatctcgctttaacgggcagtaagacccccctcaaaattcagcgaaagcaaagagaagttagatgggggatcaactgcccgtaaaagccccattggttcaactaataatcattgggggaagaacatcccctactgattaaagtttcattctattgcaaaggggattggtatatgagtcaagtatcacaaaaggcagtttcattcgagccggaagaaaaaaaggaaaaaaaagaatggaaaataaacgtatttgcaatgttacttgtcttgttaggtattgcggctgtgattacacatatattgccggccggaaaatatgaacagattgaaaaaaatgggtatacaacagtagatccaaattcatttaaatggattgaatcaacgccacttggattttttgatacggtaaaatctattcctacagggatggtagaagctgctaatattatcttttttattcttattatcggaggtttttttggtgtattaaaggcatccggtacagttgaggctcttgtttcaacgatggcaaaaaaactcgctaaccgtgaaaagttaatgattcctattatcatgctgttctttgcacttggcgggtcattaatggggatggctgaggaagctttagtgtatgtacctctatttattccgctagctcttgcggttggatttgatacgataacaggaactgcgatggtactagtaggagcgtccgtcggatttacaacggcaattatgaatccgtttacagttgggctggctcaagggatagcgggtcttcctatgtattcggggatggggttccgcctcgttttattcgtagtcatatatgtaattgctgttacattcgtttatcgtcatgcgatgaaagtaaagagagatcctgcaagcggaatttacggaaaattcgatacaaacaagcaagacagcctactaacagcgaaagtagagttaacaaaaagacataaatggatattaacggcctttttaatcaattatattattcttgtatttggtgttattaagtacgagtggtatataaaagaaattgcagccttatttattattttaactataatcattgcaattcttggcaagatatctcttgatgatacagtagaatcttttacacaaggatcggcatctttaatcgggggagctttaattattggtgtatcacgcgctattttagttgtcttgaatcaagggcatattatagacccactactgtatcaagtgtcggaaggaatggaacatatttctccttttttaagtgttgttggaatgtacaacttccaagtagcgattcattttattttagcatcaggtagtggtcatgcaatgttgacaatgcctatcatggcgccacttgcagatttattggacattacacgccaaacagctgtattatccttttcattcgcggatggtattggaaacattatttttccgacaggtggtacgctaatggctggattagcaattgcaggaatttcatggacaaggtgggcaaggtggattcttcctttaattctaattgaatactcgatcggtttaatagcagttataattgctcatcttattggttatggtccgtcttaataaagactatacataaatataaaactgaagagactcggaagcagaattacttcagcacgattaggaagagcgatggtgcgagttgggaaagatggatattcgcattcaattattgagagttcggatttgaagaagattgggaagtgatttacgaaagggaatagaaagaatgaaaaagaacctaatttctctattttatatggagaagttaggttttttcgttttgaaatcattatgagaaatttcttatatatttctcatatattcatcatgcttccttcattttcttctcacgtctacgttttacaatcgtatgtatcaaaggtaaagggaggtcatacattttttacttatttcaaaacgaaggatagatggtggtgaacagatgaaaaagaataaacgtaaaaaattgcgttggttaaaatggattttgatccttccgttacttctgggattactattgtttggattacatagtatgaagtttgaaaggtggggtcatgagaaacataagcaagcagcatatacagtttctcacgataaagaaagagaagctttcgttacgcaaaaagaaaaatttaataactttgagcgagatcagcatcatgaaaaacaccacgaaaaagagtttgaaggtttattctttataccattcttgttagcgtttggatttgttcttttcggctggtacatgcttcgtaagtctgaaggaaatatggttaaaaagtggacaggcatattgctcctagttattggtgtattaccagttcttccggtgctcgcatttgttgcgataattgtttggacatataaaaaattaaaggaaaaaagattggcaactcatatagatgtatacagcgattttcaagtgcaccaacaagtggatattttagatcaatgggaaagaagtattcgtaaggaggagaagtaataatgggtattttaaaacgtattaaaaatattgtagtggcggatgtgcatcaaacgctagataaaatagaaaatccgattagtatgttaaagcaatatcttcgcgagacagaacagcaaattacgaaggcggaaaaagcactttcgcatcaatattatttagaaaagaaatatgaagcattaatttcagaaacgaatgctcttattgcgaagagaacgcgccaagcggaacttgccgtatcacgtgaagaagatcatatggcgcagttagctttgcaagaaaaaattgtgaatgagaaaaaagcggagttataccgccagcagtacgaaataacaaaagagcaaacagcgacgctttatgaacaaattgacaaactgcaaaagaaatatggagaattgcaatataaagaacttgttcttgtttcaaggttaaatgcggcgcaagcgataaaagaaagcaacagagcgattgattcgttccatacagaaagtacagcgaaaggttttgcacgtattgaatcgtacgtacagaaattagaagcagaaacagctgctagcaactacttttacaatatgaagtctccgaatcaacaagaagtgttagataaaaatttacaagaagaagtgcagcgggagttagagaagttgaaagagaataaatagtatgcaaaaagcccatttcatatgggctttttttatcgataaaattatctattcttttccaaactgaaaaatatcccgattaataagttggtggagatacctatccatttcagcagcagaaacttttctttcatttttaaaccaccatgcgcttaatgaggtgattgcccctgaataaaattcaatgattagatcatttggcatcgtatgatttttgcgcagttgatgtaacgcttctatttcttgttttctcgtttcgtgacttaaatactgtgtccggttaataaattgttcatcagacatttgtgtttctaatattttaccgatttcttcatggtgtagaaattgttccattacttgaaatggtttacttaatcgatctgaaaccggtattcccgcaatcatcttgctgtatcgtttaaatccaaatgctaataaagcatctttatcttcgaagtgtttataaaaggttgttcggtgtaccatcgcacggtcacatatttggttaatcgtgatcgtactatatttctgttttgattgtgtcattaattcaaataaggaatcccatagtaatttatgtgtacgtctaatacgtaaatcaatttgtttttcattatcgttcatctacaattctccttttttgtagattaaatatacagtggctgaaaattgattctccctttttaatctacatatgtatattatattacatgtgttctggtgtatttaaagttttttagtaagaaacaggaggagaatttgcaaatgaatatgacaactaagagcccagcaagtggcaaagttgatacttctaatatgaaacatacccctattttaattgcattacttttaggggcaatggttgcattattaaatgaaacattacttggtaatgcgttaacagtattaatgaaagaatttggcgtaacagcttcaacgattcaatggctttctacagcgtacatgttagtagttggggttttagttccaattacagcgttacttcagcaatggctcacaacgagacaaatgtttttgatcgctatggtaacgtttttagctggtacattaattgcgggatccgcaccgacattttctgttttattagtcggccgtatcgtccaagctgtagcgacgggattaattacaccgttattaatgaatacgattttaatcatttgtccacctgaaaaacgtggtgccacaatgggattaatcgcacttgtgatgatggcagctccggcaattggtcctacattatctggagtaatcgtagactcactaaattggcgctggttattctatattgttattcctgtcgtgatcatttccattatgattggaatgaagtacattcaaaatgtttcagagttaacaaggccaaaagtagattatccatctatccttttatcgacactcggatttggcggacttgtgtatagctttagtgcatcgggtgatttaggatggtccgatgcgaaagtgtatggcactttacttgttgggcttatctcattatgtatttttgtcgtccgacaattaaaaattgagaatccaattttagaattacgcgcatttaaagtctcgatgtttacattatcaattggattaatcgtcattgtgatgatgtcgttattttcaacgatgactttattaccgatgttcctgcaaacagttttactcgttacagcttttaaatcaggaatcatcatgcttccgggaagtgttattagcgccataatgggaccaatcgcaggtaaactatttgataaatttagtccgaaagttattatcgttcccggtattgtgttagtggggatagcaatgttcttatttaaaggcattactcctgatacatcaatggtacaaattattgttatgcatagcgtattaatggttggactcatgtttgttatgacagcacaaacatacggtttaaatcaattaacaccagatttatatccgcacggaacagcactgtttagtacactgcaacaagtagctggcgcaattggtacagctatattcatatcgaaaatgtcttcaggaacaactagctatatggaaagctccgcaaatccactggatccagtagagaagttaaacggtttaacgtctggattccaaggtgcatttgcactagggttagtctttatcattgttgcttttatcgtatcgttgtttttaaaagaggagaaagagggagtaaaggcagcgagggttttacagaacgaacattaaggtttatataaaaaagacatctttccctaaaaaagatgtcttttttatatttttttcgtaacacttgtttttgatgtcttaatacataagaattggtatgtaaaatatttgtattttttgaacatgaataattattgagaataacgatgcaaagctgtgctaataactaaaagtccaataatgagagaaagagttcttataataagttctgccactaatagttcaccaaatgatttagtgacatcgtatatagatcctgttatgagaataggtgcaatcataattataattccaattattatttgaagaagtagattgatgtttttattcaagacaatcacctccaaaaaaatagggaatgagaatatgggtttttttgtattataaaatgattatatcgtattacattaaacgatgagaatatttttaaatagtagaaattagagactcttcaataaaaaggaattaaatatggtattctttagttaagatatgtaaacgaagacgggggaatgaagatggataagaagctaaagtattggctagcatctattatagggggagtagtacttgcaactggtatgacttatggaatattacagtttgctgaagtcccgcttaagggtgaggaccatgtttttgcagaggttaataaagaagacatactatcgaatgaagcagaagtgaaaggttcaaatgcacaacttcacattacagtaacttctactgaagaagaagttatttcagctatgcatagcatgactcatcaaaaagtaaaagcgtgtgaaggaaagggagcaacccctatgtccaaaaagaatgcagagaaagtaagaaatattctaaacggaaacaatttcaagaacaaagaagagctattagcaattactgaaagatgggcaaatagagattttagtaaaattgtagaagaacataactattttattaaacttcaaggtggcaagataggtgaagctacagtgatggataaggtagacgagcaagtattctgtctcaatactttcggtgatgatgtaacggccgcattaattaaatcaggagatcttcaagcgctgtaaggtgttttttctctgatataaagaaagcctcaagtattcatatacttgaggcttttccaatggaaagataggaatggtccgaattctttacattaagaacaaagtggaattactcctaaaccaattaataaagctgcagcaactgctggaattggtacaggaatttgaataccttctacaaataagaaatattgaccacttactattttaaaacaaactaattgcatggctattcctcccttcttttaggattaatacattatattaatttatctatctattgatatagttaaattatttatttttaaaaatatagttaatatgtgaatagtcttcgaaaggacctgctcaatcaatgcggaaaaacataagatgaaacgaatccattaaaatacatgagtgaaccttagttttcccctcttatctaaaggaggaactattatgggttatggtggtagttgtgttattcattttattaatcatcgttggagcttcttgcttctgctaaaaactattggaaaagacactcatatagagtgtcttttctttcgtgcaaaatgattcctgacaatagccaactgtataaagtatacggtatacttttgcctcattagacatataaaaatgttggagggatgttatgaaactagtagggaagcacatttatattcggctttataaaactgctgatgctaacgagttagctaacttacatattagaaatcgcgaattttttcaacgagtttgcccgttgctcccagaagttttttatacagaagaacatcaaaaaatacgtcttgaacaagctctaaaaaagacagctgaaggacaagtatacccttttggaatctttttaagagaaaatgataaacttatcggagacatttcattaactcaaattgttaggggagacctccaaagctgttatacgggattcactttagataaggagcataatgcaaagggctatgcaacagaggctcttcaacttgttgtagattttgcttttagggaattaaagctacatagaattgaagcaggagcgatgcttgataatatagcatctattcgtgtattagaaaaagtggggtttaaaaaagaaggtatagcgaaagaaaatataaggattaatggcaaatggacagatcatcaaatattagctattatcaatagtttggatgtgtaagcttattttgattccaataacgataattatgtaaatacgaaaccccttcagcaagtaaactgaaggggttttttctagatacattgaatcccgataagtgatgttatggtaactaagtctttgtaagtattgtcactatggtataatatggttaattatgtttgtaaaaaggagaaatgtttaatgggagtttttacagcattgttagcaactagctcaattttattagtagcttgggttgtaggtgaaagagaaaaacaaaatcaataataatattttatatttatggatgaattaattataaaattaagaggggtttgggtatgggagacgcatatgggggactaaaatattttggttttttacttgtattagtatttagtgcgggatttattatacgttggatttttcgtgatgtaatttcgttagatcaattacttggtttaggtataggaattattacgttaataatggcgttttttataaagaaatacagtaaagagctaaatactaatagttaatttatgttttctttggatgagtatctcgatagtgaggagatactcatcttttcttatgagggattcaacttctttgtttataatacttcgaatgtatacttttattttatattttgagagtatcagaagatttggtgtgaactcaatgtttaaggtaatttaaaagtttactttcaggaataacaaaaaaagagtcctatattaaaatgtaccctatagaatagacacttgaaaaaagtctattctatagggtatttgaaaatgtacatatttattcaagcgttaatgtacatatttaagttagcatttatagggggggaaagtattgttatctaacttatttatttggatttctttaatactatttataattattatgaaaagtaagatgcgactattatttaggattcctatagctatctttatagctttgctaattttgtccattggtgctatttatgaattatatcccaatttggagaaaattcaggatggattagaggggaatcaagaaattattattagatgatgttccaatatgagaagaattaatatgtgaataactgcatgaatattataaggtgtgaaatacgtgaaagatcatttcgttacacgaagtgatctttctttttttttgcgtaaatccaataaatatatagaaaaatcgggggatacggaaggacggaacgaagtggagcgaacgacatttttttcgctctttgagcaaaaaaaattagtaatgcaggataagggggacgccacatacgtggctacaactaccaggcaaagcctggtatatcatggttttttcgtgaacacatttgtgttcattctactttaataaaatgcttttatgtgggaacaaaatgtgatactattttactagtactaaataactacgtagcaacaatgtatggtggtgataattattcataaaaataaaaatagtaggtataatgacctactcagagtccgagttccaacagatttaaaagcgaaattaaatgcggtagcagaggagaggggagaagatacagcagatgtagtaaggcgtttttgtgaagagggattacacaggcattatgcagaaaataatatggattttattaaagttgaaatacgagaagctttaagagatgtactgaaaccttcggtagaacgtcttgcgaaaattggtgctaaaggatcagtttcagcaggtacagcgatgtatatgttagttgaatcattaggtagacagaatttagatgttaaagacatatattctcgtgcacggattaaatctgtagaaagtttaaggtcaaaaggagatattgatgaataataaattactaatgttttaaaatttttgatttgatttattgaaaggtataaaaagaagtatgaaagctccatttatcatgaaaacaagtttttatttacctagcacttctaatgctaaaaaaaatagtgcccatgttgaatacataggaacaagaccaggcgtaagtatggaaacaacaaaagactttgaagagttagaagaaaaaacagatgccgcacatcatgcaaagtatgctggggaacgccctggatcacatggcctttttacccaaaatagtaatgaagctctcgttttgaaagacgtacaaaaagaactaagagagcatgacggggttgtttggcgaatgatacttagcttaaaagaagaagatgctttgaatctaggatttacggagaaaaggaaatgggaagatcttcttcgttcgacagttccagatgcagcaaaaaaaatgggtattacagaaagtaatttgaaatggattgccgcctttcatgaggaaaagggccatccgcatgttcaccttatgatgtgggaaaaagagactaagcgtgaaagaggggctttgtctaaaggggaacatagagatgtaaaaaatgtatttatgaatgaaatatatcgtgaagaaaggcaggaattaaatttaataaaaactgtagaacgtgatttcattcgagagttcgctttagacaacgttgtagatgcagtcaaaatgttaaaaggtttagatgaagtagataaaacacaagttggcattgcaccacgcatacacacgcatgatattgaaaaattgcagaagtctctttatgaactttccaaaatgttaccagaaaagggccgtatgagttatgcatttatgccagatgaggtcaaaaaagaggttgatgaaatatcaaattggttaataaatcgacctcagtttatggaatctacagaacgttatttatcttccgtagaaggtctaacaaaattacattctcatgatcctgaaagaatagaattagcgaaagaaaaagcaatgaaagacattcaaaaaagagtttcgcaggttcttttaaagggtgcattagagacaaggattaattttctaccaaaagttgaccaagaaaaagcgatgaaggcacaaatgcaatttataaaagctaatggtaaaccgaaacaagatcttagttatgatgtgactaaaaaaagtgcagcattattaaaacatttatccttttcggaaaatgaaatcaaaagggtttttgaaacctggtcggagaaagcggatttggggcttagtgaaaaagaaattagcaaaagtattgctaattcatcaaaagaagatattaaaactattgatgaaaaagacattaaaactggagctgaaatactaaaattagcaggttggacaaataatgaaattatatccaagttaaatagatacgatgacgttttagatgggattgaaaaagttttaaataagatcgaaaaaaaagcgaactctaactttgtatcgaaaaaagattttagcaagattgaggaaataacagatgtatctgtggattatccatataaattagtagaacgcagtgaagtttcaaaagaagatgtggataaaatgattgaaacattttcgcaaggtatatgcagggatgaagcggcagctggatggacagcgttttgcatgagtgttgccctaaagcaaagtgaagtttctgagagtaaaagaattgatgttgtttcagagtggattcgttctaatgaaatagcaggagtagatttgtatgcgattaatgaaaaaatcgaagaaggatctaattttttacgtaagaatacatgggataaagtattaggaaatataggtgttaaaccagaagattttaaatacccattcaagacttttcaagaattagagtttgacgaacaaaaagctgatgaaactttattgcagttagaaaatattgtagtcgaaaaaatggaagtgccagatagagaacatttaaccgaggtctatgcaaggattttaagaggcgtggcatctgacaattcgttatttaaagaaaaaataaatgtttgggctaaaaaaagaaagttacctcaaagtttagttactaaggtaataaaaaaatatgaaaaaagaacgaacgacattgaatacttaaaaagacctttaagagtacaggatatgaccgaaaaaactattcgggattacagtaaggttctatttgctacaggcatgtcagaagaaaaggttaaagataccgtacttgaatggaatagacgggtgaaaagtaatgctccacccgaaaaaatcgaaaaaataattgaacaagtaggagctcttaacgaggaaaatcaaagatggggaaaagcaacctatgtaaataaagagagttataaacaattaaatgagactttaaatgttaaagctccatatatttataaaatgccatcattcaagaatccgaacgcttcaattaataagatatggaagtcattctggaatgagttagaaaaagagcgtatgaaatcagaaaaagaaatggaatatgcaagaaaaagaatgatgagagcaaaagaacaagaacaaaaacaaagacaagaaagggaagagagaggttgaaattccgaatatttttagttgtttttgtgattttagctgatttactaatcttaccaaagattgtatataatttagaccttttatttaagggaattgatcttcaaattgttattaataatttaactacattttccgttatatacccatgggtaattttgaagcaatcttatggaacattttatttaatattacagggttttgttgccacagctattgttttgattatctggaaagaaaatagaggcataaaaaataaaatgaagaatggtattggcggtccagaggcatccggtggtgggcaatttgggacaagtaggtggcaaactgaaaaagagagagatgctaataatagtgtttggaaatatgaaaaagaacctataaaaacagctggtatagtcctgggggctgatttaaaaaagaaaaaagtatggcttgtatcggaagatgaacatacattaattatcggtacaactggttcaggtaaaacacgaagaattatttatcctgcaatatggacgttagcaaaagctggcgaaagtatgattttaacagatccaaagggtgaattatatgcagcaaccaagaaattcttggaagaacagggttacgaagtaataatgttggatttccgtaaacctaaggctagtacacatcattggaatccaataaaagctgttgtagatgctttaaaggaagatgatgaatcgaaagcttctgaagcagcatggaatatagcaaacatgattgtatatcaaaaagagcgtacgggcgaccctgtttgggctactggagccgaaagtgttattgccgcattgattttatatatagccatagaatcaaagaaagatagtcaaaagcatatggctagtgtgtttcaattgctagttgagtatggggtagttaagaaacgtgaaattggcgatgggatgatggaggaatatgttcccttattggaattgattgaatcgttagaacgaggccaccttgcaaaattagcatttgctacagctggtatggctcctgaaaaaatgcgtggtagcttctttgcatctgttgcagcagatttaagattatttgcagatccttcaattgcatatatgactagttttcaagatcacgatttaaaacaacctggtgaaaagaaaacagcaacattccttattatccctgacgaagttaagactcgacatttcttagcaacgttatatatagatcaaacgtatttcgagttggttaatttggcaaattctagaccagagggacgaattgcaataagaactagctgtttacttgatgagtttggtaatatgccgagaatttcagattttgacactaaaattactgtttcaaggagtaggggagttagatataacattgttgttcagggattggatcaaattaaagaaaagtatgggaaattggctaatacaataaccggaaactgtagagtctggttatacttgttgactggtgataatgaaacagcagaagttattagtaaaaaattaggaacatacacagttgcaactgatggctattcagctactactagaacgaaagacttttctgctagttattcacagaatctatcaaaacgtgaactgttaacacctgatgaagtaatgagatttccagattttgaagcgattgttattaggcaacgtcaatatgctacaagagtccctactcctgatatttcgaagtatcctattaaatttatacccattgaaaggggtgatttggaaaagaaagatattagatttgatgtatttgatccatttaaagcgcaatgggaaggagaacttgaagcaatcgaaaaagctaataagacaaatgatttagaagaaactgctgagacagaagaatttgaagaaacaatggatattacaaatgaaccaatagatgtagctgaacaaaaagaaagctatatggacattatttaggaggattagggaatgaaagaaaataaagatttaaaaatgaataaaggtaaaaagaaaaaaattagttttaaacattatttagcttttgcattaccatatgtattgtttgcagcactgtttgtaattgatacttcagcatatgcggctggggagccaaagatttattctggtactaaaaaaatgattggtgatgctacaacatggcttatcgcactagttcctattgcgggtggttgtatggttgcttggcaacagtttaaaaagcaaatgtctgataatgatccagctgatattgcacatgcaaataaacgtactaaacagattttagttgcaacagcaattggtgtatcggctgtagggttaattaaatggtgggctagttactataactaagaagaaggttaaaaaacatgggattcatattagataagatatttaacagttggattaatggagcaattgaatttttcttgaaaataattgccgaaattgccggcgtatctgtttatgtattagaactagatattgtaaaacaggccataatctatacgcaagttattgctctatcctgggttgtagttgttgttgcattccaagctatatacacttatatacttagaatgaatggggatagtggagcagatcctatggcacttataaaaggttccggtcaagcggtagcagttatttgtacgattccttggattgtatcttatgtatataaatttggtacacagatggctgttgatgtagctaaattacctggagccaaatgggacaagagtactagtgaaataaagcaaacactggatttaattgcaaaatcaacatctgttatacctctatttgtattattatcggttatcgtggctgttgtagccattattattgttcttatacaaacatctattagagcagctgaactagcttatgcagctgtagcgggtccacttttggctactggattggttacaaattcagggatgtattcagcttggtggaaagatgttttagcgatatcattagcccaggcttcacagctatttatgttaaaacttagttttgaggctttaaaaacaatggtatacaaagattttccgattatgtcgttattcctattcttggggattctttgggtggcaatcaaagtaccgaaaacccttcaaaattgggttcatagtacaggaacagggagaatggcaacaggtgtagctcagcaggcagctacagcagttataatgagaaaagcaatgacgaagggagcttaatatctatggaagatagagagtttgagaatccatatttaatccctaaaaacattaaagcacgatttgaattaatacctggttttgggtggcgagaaattttcgtcaccttagcaggtgcaatagttggatttatgcttttactgttattaggagttttcggaattcctataattgttaggatattcctcgctgtaatgtgtgcaggtataggatatggtatatcggttcaaaatccacgtactggagtgaacttattagatattttaaaaatgatgaggcaattcaatgcgagacctaaacgattttattacgtttttggtgaagggagagaaagagattaatgagtctttttaagagtaaatctaaaaataatctttcaccggagcaagttgcaactcaaaaaaacaaagcagttgctcaacagtggatgcccgtgatggatattaacaatgaattgcttcatttgaaaaacggttcgattgtaggatttataaaagttcagcctttgaatatggatttattatcaaagaaggaacaacgaagaaaaattaaaagtttaactgaagtttataacgggataactcgtggtcaacaaacattaactattgctagaccagttgatttagatggttatatttataggttacaagagaaaaaggcaaatgaagaaactccagttaaaagaaaaattatagaacaggatattaagcgtgcaattatgatgtctagtggtggtgaggcggtagaacgtcaattttatatcataatatcaagccgaaataacaaagatgatatggatcaggatcagttacgtagaacatgtaatgaaattgcacaagaacttaaaggagcaagtttatccggacaagtatgtgatgatcaaatgattcgtgatttacaattcttatttggaaattcagcacaatcttcagtggaaagagcaccaatagataatggcccatttatacaagctttttataatggtaatgatactgtaaatgatgaggaaaatgagggagcataaaatatggcgaaggtaaaagaaaagaagaaaaagattgctggcaaaaatcaattgtcaggattcttagatgtaattacacctagtgtgataaattttcagcctaaacaattaaactatggggatagatttcaacgtgtacttgttataactgattatcctcaacgtgtaggggaagcgtggctaagtcgaattgcaaatattcctggtgtagtaacgtcaatgcatacggaacctattgacccatatgatttagtaaatgaaattcgtgtttctatgggtgaacttggagccaaaattgaaaatatgggaaatccagtttcaagagaaagggcacaggatcaatatgatgatgcaaaggcaattttaaaaaagattgatagagaacagcaaaaagtaatgttaatgacggtggtacttttagtatcagctgaagatttagatgaattaaatacgagatgccgaagagtagaaagtatgcttgcagcagcagggttaagggcaagaacaccgatgtttctacaagaagaaggattaagaactgtaggcccatgggggatgatggaaaatcgaattaaagatataggagctagaaatatgccagctgagtccgtagcagcaggcttcccatttgtatattcaggtcttaatgacggtgaaggtattttattaggtactgataaaggtggagggattattctttgtgatttctggactaggcgagaaagtagaacaaactcaaatctaactgttatcggccgcccaggtgtaggaaagagtacagctgttaaaaagattttgcgtggtgagtatggtcgtggaacaaaaattatcattatagacccagaagatgaatatggtgatttagcaagaaatatggatggggatgctattgattgtgggggatcacaagaaagtcgaataaaccccctacagataagagatgtcccattagatgataaagatgaaaaagaaaagttatatgaagaagttgaaggaaataatagtggcccattagcgtatcactttcaattcttacgaacatttttcaaactatatttaggtaatataagtagaagagatatgagtttattggaagtagccttagaagcattgtataactcaaaaggtattaattgggctactaatccacaagacatacctaatgaacagtatccaacattaaaagatttatactttatactattagatttatcgaaggaaaatgtggaggaacttacaaaaaaatggggagacttatccaacgtttctctaacgggtgcaaatagcaaggattggcttgatctatctattttattaagatcagcagcggtaggagcagattcatttttatggagtggaccgactacaattaatcctaaatcagattttgttgtattaaatattaagaacttactagaggcgaatgatgagattagaagggcacaattttataatgttttaggttgggcctggaatgaggtttcaaaaaatagaaaagaaaaggttttacttggtgtggatgaatgttacttattaattgatcctgaagtcccagaaacaattaagtttttacgaaatacctcaaaacgtattcgtaaatatgaaggcggtttaatggtaataacacaggatttagtagatttcttagatccagctgtaaagcgatatggacaagccttactaaataaccctgtatataaaattttactaggacaaggtgaaaaagatattgaagcattagaaaaattaatgactttatcagaaagagaaatacatacattatcagaagggaataggggagaagctctatttattgctggtaatagacgaatgcatttaaaaatagatatttctccagaagaattaattatgtttggtgaggctggaggccgttaatagaattaaggtgaaatataaatatatttgttcttaaaagaacgtagagtttgttttattaggtaattattactactctatgttctttttagaacgttttagaaggtgaaacggtgatttacttaaaggcagctttacttttaaaagattattggaaaccaattttgatggtcttgataactgggattgttttagtgttattaggcccttttcttttgctaacatcttcaactccaggtggcaaagaggaaactattaaaaaatatatagaggtagcaactaatttacagattaattgggtagaactggtcgcatttgatatggtcaagtacgaaaatcatttagacggaaaagatcctcatgattcagcttatcattttataaagcttaaatatgaagaatataaaacagaagaaaaatgtattaaaacaaacaaagaaactggtcaatgtgaagagaaacaaacgcaagaaatagttacatctagtaaagaaattaaagggaaaaaggcagttcaagatttttttgcgaaatttaatctttcaggaaatagtataagtaacaatataaagaagattagcgatatgcctggaaaacgtgtaataagttcctctgtaacattagatgaggcgatggatgatgctaagtttacaaaggaacagaaagaatatgttaaaaagctgattgaagcaggaacaatccagcagatgtttcccgatgcaggtacaggaacaggagcggtgtgtacaccaagcggtactttaaataaggaattaattcgtcaacagatggataaagcggggaaatttaaaggaatgacagatgattttataagcatagcggaaaaacataagattgatccagttatttttatttcaatcgcatttcacgaaaccggaagaggaacatcaagggcggttcgagagaaaaataatcctggaggaattatgggaagtggaggactatggactttttctactttacatgagggactagattttatggcaaagaacttatataaactatacatatcacaggggttaacaacaattccaaaaataggtgctaaatatgctcctgtgggtgcaagtaatgacccacagggaatgaataaagattgggtacctgtaacaacacaaatagcaaattcattgggtggactaacgatgaattgtgaagctggaaatcaaggtggaggtatagttttagatggaagtggcggacaaaaatttgatgctaataaagtatatacatctatggcacaattccttggaagaccttatgtttgggcaggtgctaatccagcacaaggttttgattgtagtggtttaatgcaatggaattttagacaggcagctgggataaatcttccacgtacagcgcaagaacaatataatgccacagcaagagtaaataaagaacaattacagcctggggatcttgtatttttctacggcacatacgtagggccaaaagtcacacacgttgggatgtacattggaaatgggaaaatgattaattcaaacagttcgggcataaaaattgataatgtatttgaaggatattggaatagacaatattacggtggtggacgaattgttcgttaagtatctaaaaggagagggacaatttgaaaagtagagtgattataagtgtggcagtcatattatttatgacggtttcttatttatttatatatacttatggggaaaatcgaaaattaaaaaatgaaattgcgaaattccattcagaagaagaggtaaaaacagaaatgaatggatttattaaagagatgtctgaagggaaatccgaggaatttgaaaaatatttgattggtgaagctaaaaagaattttttaagtataaaagaaagaaagcaagaagatttaaaggttaagcaaacagacatccaagagcttagggcaatagcgaaaaatagtgaaaaaactaagattacatcttatgcaacatataggactacatatgatgtaggtacggatgatattcaatccatttatgtacaagctattagtgtaaaggctgagtggattaaaactgataccggttggaaatgtgagcattatgaaattcatttgtagaaaggtagtgtgtaaggatggatggtattatagcacgtcctaaatttgttgaagagataaaagctgctctcgaaagagaggctgcttttataaaaattggtgaatttgaagaagatagttttaagcaagcttgtttttcagcagctcaggtttcgttaaagctacttttaattgatataggggttacagatagtgctagtttgataactggaattaaatctattcgtgctagtaagccatctataagaattgtattattagcgatagataaagagccaggcgataaaacggtagcagctgttgtgagtatgggcattacagatgtaataccgttatcgactgaaactatagatgaaaaagggaaggagcgagaaaacttcacgcctttaatagaaaagcatattaagaggaatacaacatatgctgatgttgttagatggcattatgaagtaggaaatgaattttctacttctaatgaaaagataaaaaccaagatacttacaaaaaagcaggttatagagaaaaaaatttatgaaacaaaaaccgaggtagtatccgttgcaaataaaaatatagcaatatgcggtttaagttcgaaatcaggtagtagttttgtgtctatgaatcttgcaatggcaatgagtgattatgatctagcaatttctatagtagaaccaccaataaatccgtatttttttgatacattgttactacatgaacacgaagaagaggataatcaattcatgtcaattcctcacatgattaaacaaaatgaaatcggaaacaaggagtttaataataaggtctttgatatttattggaatgtagctgatactagaaaaagtaaaattggtgaatggggaattaatgaattaataaaacaaatacattttgagaaaaaggcaattaatattgtagactttggggagaatgtaccactagatgcatttagctatatggattatatatttattataatagatcctcaaccgtatttaatcgccaaggaaatagataaagtaatgaattttgtaaaattaaagcaggaaggccacccaatatattttatctttaataagatgaataaaggggtagatggtaaaggtttatgtaattctctaggattagaaggggttataaatattccacatatagatcccgtaattacatataactgtctatacgatggtaggattccatttgagcataaagatatagatgaagaatttgtagatagtatggatattataataaaagaggttataggtaataagtactataagaaggagaaaaaaacttctctgtttaatagattttttaagaagtgaaatatagtgaatttaatttaatatttataaaaaaagaattggaatataggttgatagtcctggtgaacacctatatttcagttcttttttatattgataaattttatttgtaaaaaatgtgtacattaattttaaatatgctataatgttcctaaaggaacattattagtcatatataactaataaataattttttatgtagttacaaatacctaatattgatgttgagtagttgggggttggtacatgagtctactcatagtttcgctgtttattacatatatgctctttaacatttatacagattttctgtacttaaaaactaaaggttactggcatcttatatttttagttctttgtatctgtctgggcgtaataacacatataaaattattagatctaatgtgtgtagtttgcgtttcactagttgtagggatattgcgagagaatatgaaactaattcgtttttctcctggtgacacaaagatgattattgttgcatctttgttttatttcctaattagtccagaggaaggcgtattatatacagcattaatagtgcatattgcaattttcatgtgctcatcaattttgacaggatttattactttgttattgcttttcaaatcttttatacgatttaaaacaataactggatatcacagtattaaatttaaaaaaatgaatatctcgctagtgacagatgggtggaaggtaactcgtatgtactattgtttgccagcagctatttcagtgctagggggtgttataccattaattctaatgtcattgaaataaatgaatgcattgctggttttacgcaatgattgtatattagaataatggaattaaaaaggaggaaatttataatgaaaaagaaattattaactacagcaacagcattgactattatggggacagcagttttagggacaggagcttcagttaatgcggctgataatacagattcattaaaatataatgatgttccagcaaatcactggtctacgaaggcaatttacgatttaacaaaccgtaaagtagtgcaaggttatggaaataatgtctttggttttggtgacaatgtaactcgtggacaagtagcacgtatgatttatacatacgtaaaaccagcggatgcagatgctagtttcaaaaatccttttactgatattaaaggacatttgtttgaaaaagagattttagcagttgctaaagcaggacttgtgaaaggatttggtgatggtaagtatggaccagatgatatcttaactcgtgagcaaatggcacaagtacttacaaatgcttttaaatttaagggtacgaaaacaacaaaatttgcagatgttgataaaaattcttgggcttatggtgcaatcagtgcattagaagaaaatggagttacaattggtacaggaggtaatatgtattcaccacaaatgcatgtaacacgtgaagcatatagtcagttcctttataactctattaatgtagtagaaaagaaaaaacctgagactaagccagaagtgaagccagaggaaaaacctgagactaagccagaggtgaagccagaggaaaaacctgagactaagccagaagtgaagccagaggaaaaaccagaaacaaagccagaacaaaaattacctgaggggttaaaccaggagttaacaacaccagaaacaaagtttaatgaaacagcatttaataatttaccgattgctcaaaaatcagtttcaagtggcgctcaaaacattgttaaatctgtcaattctacatacggtacaaatttgaaatttaatgaaattggtgtatcagtagcacttaaagaccagggaatgtatttaccagcaggtacatttaattcacaatttttagttgaaggcgtaaataaagatgaattcgaaatttactttttaggaaataacgctgcaactgtagaacttgctaaacaatgggttaatctattaaatccatcacttaacttagattcagagattgatagtgtagtagcaactcataaaattagtaactatgaaaaagaaaataacaaaataagaattgggctatcaacagcggatcaaatgctttatatccgtgtagaatctaaataatttaaattaatttatggcatacgaactagataaaaataaattaaactagttcgtatgccaccaatacacgaaaggaggaaaatcgtgtatagagtaagacctttgttgtttttattgatatttatattctcgttactagttcccaatgcagctagtgctagaaataatgatgttccattctataatggaactccagatacggaactaacttctaggcagttacaaatacctggtaagttacttcgaccaggtaaaggatatacacccccaggaagtgagaatatatattatacagctgacatacattatccagcattgtataatggtgcatttaattttggtaatcatcatgaaaacttgattaaaaacactgaatcttcagagccttttgtcaatttaattaatgatggagttatagggagtggaaatcctataggtaatcggatggtcactgaagtggaaagaatgaatgcttctatagtatccaatatttattttggtaatggagattttgtattaggtaatataaataaacatactatatcccatgaagaaacaggtaaaagatatggtaatttttattggataagagatatagcttatttaagtgggggatatgctggtgcaggtttaagtagggaaattaatccatataacatatggattgtcaggacgagtttcccagatataactaaattcagtgcaacaaatggctccaaatcaaatccagtgttttttgatctagagggctatgaatatgtttcaaaaaacaaaggttacacagataatgacccgaatagtaccacgactaatccatacgaagaaagtgctggggaaagaaaccgggtacattggttcttagaaatttataaagatggggatttggtagataagaaaaacggatatatgcgctcgaaaccaaaaagtaatccatctaaagcgaatgagaaagaatcaggtcactttgtaaatgacaatgtgaatccaatagggtggcaacctgagtcgtgtggaagatttactgctaaaataaaggttctagatggtgttcaaaggacttcccaggaaaaaacaattacctttacagtcgatggggattgcgatgataaaccaactactaatccggatgataatatgtgcaaagatgattttaagtataaaatggactttgctgtagatcgaattgaaggagaaacagcagaaaaaggaacaaatatttctactcctgtaaaagtatctagagccaattttaaagaggaaagggataaatataggggtgaattaaaagagaagattaactctctacaatcagaagtaaatagtcttaaagatgatagagatagtacacggtctaatttaaagtcatgtcgtttggatcaaacttgctatgtggatgaaaaaggaaaacagcattgttacccaagagattgttcatggtgggaagaacgtttagatagtattctattaagacttcagaaagcggaagaaaaattagaatgcgaaacaaataaattaaaacgacttgaaacattagaagctcagtacaattcaacagaacctaacgtcaccttaagttttgatggtgatagggtaggggcgcagaatgttaccttaaaggaaggagagagtaaaaccataagctttgattggtcattaaaaagatctggtcaaatagaagctgaaattaatccgataccacgaaaatatgataacagtaaagatgttaaaaagacgaactttaagaataataaactagatacacctatatacacatctagtcatcaagtgtcattatgtcctcggcctggagaaaaagctagtattcatgctgtagtaagaacaataaatgacaagggaacaaaggataacctctatgaatatctgacaggtgagataattaatttatccagaaaaacattgagatcgggatatggatttagttatgaggtgaaaacaacttattctaatgaagatcctaaaagtagtgcaacagggcctaaaaatacagattcatttttcccaacaatgactaagcatttgcaatatccaaaagttgatgatggatataaagtgcaaatggaaaagacggaaaattctgtaagtgaatcggtttggtcactcccaatgacatatgttgaaaagttttcaggtaatgtctttgataaagactataaaaatcacccagcttataatccaaaagagataattctaaatggtggtcgaaagtggtatacatcttttgatcaaaaagatgggaaatatgcttttaatattaaatcttataatgctggagtaaataaattaaacttatgtctaactggcgaagtgatgattgaaggttcatttattggaaataaaaagggcgaagatgattttattagaagatcagtaaatccgagtaatccattccctgataaggtgggatggaattggcaaggaaaagaaacaatgttaacaagtttaaataattggtggacaaattggaaatatccgaatcctaaagatattcctccaggttatcataaagaatcttataaaattagtcctgaaatttaccaatctattaaagcatataataaatctcatggattaaatgtggatttaaatagtgaattctttagcaagtttaaccttaaataacctaaaaagggtgatgtaattgagtgcccctaagtttgtaataatggctcttgtattgcttggatttacattgtttattgcaagttcaagttatttgtttgcagctgatacaaatgaggacagaactttagaacaggcagcagcaagcgctatgagccagggtattaatatgggacaggttagggtggatgaagaagttacagttaatgaggatgtagtaaaagaggctcttgtgagacagtatgtagagcaatcaaatctaagtgatggtgagaagcaattacatatatatgctcttgcttctcagccatccatgcttgctgtagaatcttataacacttttgatcttccgatacgtaaatacctaaaagaagaagatgaaaaagctagtgttcgacaatttgctaacattatatttgaagcaaaaaaattgaaaaaacctaattaataggagttggaagatgtgaaaaaaaagagtacgcctaagaagttagctattactttagcagcttcaataggattagtagttgcgattgttggatacgagaattatgccgtttctagcaaggtcaatttacaaaaagtatattttactaaggttgatattccacctagaaccaagataaccaaagatatgttacaagtacgtgaagtatcaaatagctccattccccctaatgcgattaaaaatccgaatgacattgtagggaaatatactgtaaatggttttgggttagtcgagaattcatatgtttttaagaataaagtggtatctaaagatgagcttccagatgcagctattttaaacttaaaaccaagtgaagtggcatttcctctattagtagatattgagacttcttcagggaatagtattattccagaaagtcacgtggatctgtactttaagggaacagttaaggataaagatgaaaaaggtgaggttgtagaaaagcctatctttggccgcattgcaaaacatgtaagagtaacagcggttaaagatagtaatgcagcaaatgtttttgatcctgcaactataaatgtggaaggttcatatcaggatagcttaaaagaagaagcgaaaaatcgccctatggcaaagatttatacattcgcagtgaatgaagaagaaaatacattgctaaatcaaggtacattaattgggaaaataatccctgttgcaagtggaacagcatataaaacaaatgttgaaaaaacagcagatgaacaaattgtaaaatggatacaaaaacaatcgtacaaagtgaaataagagagtgagggatagacatggggagtaataatcccaaaattatcggcgtatttggtatagagcaaaatattggtaaggctacattatctcatgcgttatcaaaaataattgcagaaaatcaacataaagtattgtttgttgagttagattattcaaatccttcgtttgccaataaaacccaaatacctcttggtgatagacatatgggaaaatttatggaagaagctattttgtataatcaattaaatcttgaaaattacatttttagaaaaaaagatattcatagtaacacaaaacaatttgattggttgcccagttcattggatttactagtttatccaaaggagtatcaagcatccgaatttccagattttcaaaatgatagcgaagaaattatcattaaattcgtagaaaaattaatgaatagaatcaagagtttagactacgatgcagttatttttaaccttccatgtgaaattgacgatatttttggattaccaatattacgtaaatgtgaatatgtgattaatgtattgaatggtagccctaaatatctatcgagatatatggaattaacaaatgtctttgaacaagctgatttacaatacaagaaatggatacaagtatttaatctttgtagtagtaatataggtaaggatatttacggagaattaactgagttaaatatttctgaatgcattccgtattgcaatgaacgagctgaatttgaatttgctttgaaggtgggctctcctataattgatttgcatttgaaaactatttctcgtcaacttggtttcttcattaaacaagaagaaaaaagaggtggcattaacaaactatggagatcgtaaagaaaaatattatcaatttagagaagtatggtcatagtccagggaaaaagaaaaaaattgatattgagaagtatatttatactattaaagcaagtaatagtataggtgttaatcatgaaaaggaactaccggaagaatatttaaaagaagtaaaagatttcttgaaaaatgaacataaatcattacttcaagaatcctttggtgatgaaaaaaagaaagctgcactaaggaaagtggtttctcaatatcttattgaaaaacctaatcttccagggttttcgctagatgaactaaccaaattattagtggatgctgtagctggtttagatattttggaagcttttgcagaaaatccaaatgtaactgatattgtttgtaatgactatgatgaaatatggattactgatcttaaggaaggaaagtacctttctgatattaagtttaaagatagaaaagcatatgaaacattatgttataagtttgcatatgcatctgggcaaacttggtcatattcaaaaccagagtgtgatgcttttttccctaacatgcgcattaacttaatgggatttgatatttcacaagagggtatttcacttgcgattcgtaagtttactaagggtttaagaattagtcgagagtcgattttagaaacacagcaagcaaatgaaattatgatagatttattgaaagctattgtgagaacacgcagtagaatattaatttcaggatcaacaggagcaggtaaaacggaattattaaagtatttagtgggttacatttttaaattggatagagttctgatggtccaggatagcccggaggtcttcttaaaatttatttatccagaccgtgacattaaaacttggataacaagagaaaaagaaggggttgaaaatgttattgacttagatcgactaaaccgatccgcactacgccaatttataaaatggctaattattggggagtctcgtggtggagaagcttggagtatggttaaatcagccaaaacaggacacccagttatgacatcattacattcttttggtgcaattgatagtattgaaagggttgtagacatgtgttcagagaaagttaatatgtcattagagtcattatatagaagtgtagcaaataactttgatttcggtattcatctagaacaaacactggatggaacaagaagaattacggaaatagttgaatacacaggttataaaaatggggaagtacagtacaataagttattttcttttgatatagaagcagaaacagagtatgaagatgaaaaaggtagaactagattcaaagtagatggatgtcataaacagactggctatttaagtgatttcagaattaaagagatgaaaaaggccagagtttttactaaacaattagaagatttacaaaaggatagggagaaagaagacctacctaagggaggggcagcagttgcagtatcttaaatatttaccatatttaattatgattgcagccatctattatgttatcaatgcgaatctagatagcatacaaaataaaaagaaaaatgcattgaaatatgttttaaataataaatcaaaggatagtaaatttattacatatcttaagaaaaaaggattatataagtggattagccctaatcagattattcatgagggtaaagaattcaattggaatttaacaattaaagattatagtatgcttttaattgtaggttcattaattggggtaataatattttatgggttttttatctcggtgaattttgctgtttttggtgtgatagtaggattagttttaccgagaattatgatgttttataaaaagaaacgatatgaactatatgttgaagaacagttgatgttgtacttaaattcacttgcaaatgcgatgtcagcatatgaaaaccctagctttgcgattaaaagtatattgcctttaatgcagtcacctattaaagaagatgttgaaaattgtttaatcgtacatttagaaggaactagtattaaagaatcttttgaaccgctgattaacaagtataaatacaagaatcttaagttatttcatgacatgttggatcttatctctaaaacaggaaaagatgaagatggcttgttaatgagaatagcggatgaatttcagcaaaaaaagatatataaagccaaattaaaagcaggaatggagccaaaacgatcttcatttaaaaaaattgctattatgacagcatcatttccattcatgtttttagcagttacagcagatgattacattgcttttgcagggacaccgacagggaaaataatacttacattaatgattcttgtaaacattatctgtgcagttaaagtcgagcaacattcattctatgatccaacagaaggtataaataaaataagttaaagaaggggataaagtgaatctattaaccacgattccactgtttctcttgctgttctcactaatatatttagtagtggattatgcatttgaaagaagaaataataaaaaatttcaaatacataaatatataggacggtataggaagaatgaggaaaatcgaacatttctattcatgctctttgaaccaattctaaagcttaaaaaaaattggatacctcaaagaatggaagaggaactaaatataaaattagataaagcaaatctaaagattacaccaattgaatttttgctaaaaaaattagtaatatcaatatttgttttcctatttgcgcttatatatgcatggatatttccacaatataagctaattatcttaacagtaggcttaataatttcagctctggttttcttttatgaaaacgtaaggttgaacagtatcattaagtctagggaattaaggttggagctagagttaccagagctcatgattcctctagggtttatgctttctaaattttcagcctttgaagcgacaaaaagatcaattgagtacgcatctgatagtataaaaccttatgcagaggaattggttgctaaattagaactggaacctggtagccatgagccttatatagaatttgcaaaagcactaaatattccatccgcttatcaatttatggtagctctagagcaatctatgaagatggatgaagaaaaaagtaaagaaatcataaatgcacaaattgaagtaatgcaaaaactacaatctgaatctcatgataagttagttaaaatgagaccaggattagtttctaaatatattatttttgcttatctaggcatggttattttaattatgggaatatcatttgtttctatatttgataaattcgtcaatctgttttaatagaaggaattaataaattaataaattgctatatgcaattattataaaaaaatacaaaccaaagggagaaatttattatgaaaacattagcaatcgaaacaaaaaaaggaacaggatttttaaacaagggaaaagatctattaagaaaaagtaaatcatggttattaaatgaatcttcagatgaaactacagataaagcagtatggatgtatattggtgtaggagttgctctagtagttttaacaatcctattagtagcaatgaaaacaggaacaggaaatatcgctgacttctttgtaagtgttacaaaaggatctaaagtagaaccttcaggatggggaaaataatagaataatattaatgtaagttatacaagaggggtagtttattataactaccctttctttttagaaaaaggaggccgagattaagtgagtgaggcaatacagtatgttttatttttcattgcgttaatggcaataattttctttggtgctgagtttgctggccatactgtatataatacaaaagcgaatgagctaagtgagtatgcagtaagtctggctgaacgtgaaggggaattttcaccaacagttatagagaaagtaaaaaagaaacttgatgattggaatatggattctgataaatggaaaatggattatacaaaaggtaaagtagactttaaccaacctttaaattttaaaattgaaggtgagtatgaatataaagtattcaatttgattcaaagtggagtcggtgtaaagaaagtatcaatttcaagtacccgtagtggtttaagtcaagtttatttcagaccctagtttttttaatagagattagtggtataaaaatacatagttgtccctttataagtgctttaaagaacatgtaagataccttatactgaaaggagaatgaaaaatagaaaatgaggaatatggtatggatattaaagattatagtataaaaaaatatagaattaggcccgaagcaatgaagctaattaaatatttaaattggaaagagacttctcaaaaagaagaggataagtttttcttagataaaattgtgaatacatatttctcacagattttggcgggacaaattttaattcaaaaagaaaagataagtggacgtaaagatagatcattattattcaaaaatgatactcatcaattaatagataaaaagcattccaaagcaaagtgtacaatgggtgaaacgatagaatttagcctatttatttatgctcaggaaaatttaacttcagaagaattaaagatgaatgatttaaatgcatggaatataacatatagaagggtaagaaaataatattatgttcaaaaaaatattaaataatgttggaatgatactattgggatcggcaattgctatatgtttaatataaagaataaaagcaggtattttatagtcaaactatagaatatctgcttttatttttgtgaaaatgcctattttcagaagacaaataaaaaatgggttttcagattcctttatatgcgtgtttcaaaggaatatccatggttttggtttagaaggacagaaaatgtatttaaacgaagaataagaacagtatagataattcgataatttcacgtaccctatttttctatttttttaacaataactatttttccagatgtatggttaatctttgggatgaggatacctttatctaaaaaatccttcttactttttaattgagcttgcactaaatcctctatgggattttttttaaatgtaaaacgctttttagatcgcttataatatttccaataaaacgtagtactttttaaccgtttattttttttagctaatgtttttaaagaaaatcctttaatttttccagaagagctattagcaacaataaatttattttttttattatcatagccatataggggaatccaatgtgaaatcatagatcctttttttaagaatctgtataatttaatcggattccaccaggaaataggggtagcaatgctgaataagacaaaacaattttgtttttgtatgtcctcaataacactgatatcatctaaataattaatatctttaattttaatatcataatcgatatttttatagatgaaagtatttttgattttattaagaaaggagatatacgattcaaaatcaaaaaattcacctacaaaagtagttcctgttttaatatttgattcatctttaacaatattagcctctaagaatgaatacaccattttatcagcttgttcctttgaaacatctttcttctgattaatatggtacattccatttataaaagcataaattccacaagtgggacctgtttgtttaatacattgagccattaagacccccctttttttcaaaacgttgatttaaaaacaaaaggcagccgtaattcacagctaccttttcaattatttgataaaacaccaggtaaattatgaagctaaacgtccctcaatttcatcatatttaacttttgcagtttgtagaactttgtctaatttagctaaaatttcattttcttcatcaagggagagtgctgattcttgacggctaaaaccatttaattctacttcaataagtagtaatttttctgtaatatcattatgtatagtggaagtatcattgcatatatccctaatctgtttcgctagctcactatacttactttgatagttagtaccacgagcttgcatatcacgaaatttttcactcccaatagtccttatttcagaaatactagtggtgaccacttgaagtattttttctagctcagatctttttttatgatcatttaacttatctagaagagcacttgctgtattagctgctgttgaggctcttttactgctaaatgtaccccatgcagcagaaccaatagcaatggcactactaactatactaactgcattattagtattacttacaatatcccatacagacattactaaatctctctcttaacatatttgtatttttccatacctctataaagctcgttaaacacttcttcccaacgcttgttttcccaaaaagcataagtaatagcttcagcaaaatgataaccgtgatcaggcacaatagcatttatttgcatttcaaactcatgatgagacacttgtttaccttcaccaatcatttttctgtattcgtccataagatccattatttgtgtgaattgtatttgagtgagatcgtaatcaaatactaatcgttctacacttccattggtaaataataaattttgcttaaatgttaaatgtgcaacttgttgttttagctgttcaatttcatctaatagtgctttgttttccatatatagttcctccaaattattttgtatttattatggttttttttacccaatcattatctttaatttcttcatcaattaaacttacaatttcttgtagggcatcatctaatgtttcaaaacaagagggattacaaacagctgtactaacttctttattagtttcaataattttagcttgtgcagcatactcattttcatcgaaacataatatttctattgtggccattgttcttccagcgactacaatattaaaatattttttttcaaataattgaattggtagtgtagatttaatatgtttcatagaatcatcctttctaaaatgtatttgcaacatataaatatattataaataataatataaaaatattccatttcatcgaattaattggcttttttggttaaagcattaattttttctgtaggcatatattatgaaggaatgataaaagggggcactaaatatggacatttactcattataccattacgtaagtaaaccaattataattgaacataatgtaggagcaagttatcctaatccgttaacagtgtatataacgaaagtaaataatgatcaaagtatagaggtaatttgtacaaattctttaggacttatggttagtgagaaatttactcaaactcaaattactaaatatacttgtttgtaattagaaaggagtttggatatgcaaaatttagagtacagtcaaaggcttgtaggtccagaatattttcaagggtacttaagtagacaaatcaatatattcacaataaatggtaattataatgtttatccattgcatgtagacagtcaaaatttatattgtacagaaaatggtacaatgctagcaatgatagtacctttaggacatataacgtctatacaatgtgtaatataaggatcttatatgcgagtatttacaatagttataaccctttggaattccagataaaaacgataaataacaatgtataatagaattataaaaacgataaataacaaattagttttagaaagaagttaaaggtataattagttaatgtagtttgtaaaagaattaatacatgactaaagtctttcaatttatatattaatttacattaatctaatatataaattgattaatttgttcaaagggagagaaacaaatgcaggtaatttttgaaatgattaaagatggtcaaaatctaaatagtgaattgaacaaacttgttgtcgaaccttatattgcagaaacaggtattaaacgagaagaaattaacctaagcgatttagcaaaatggatggaggataaagtgaaaaatgaaagatgataataaggaaataatatataacaaagaaaaaatcattacatctattgatgatatttctttattacaagataagctacaagaggaacaaaaagaatttaaagctatttgttctttaaccagggagtttagaaatcttattaaaaaggtgatgtagataatgagagaacgtgagaattcagataaacccatccgttgtttttgttgtgacaagtctattttaatagaatcagcaaaacttatggatggactttattgctgtaacgattgttttgaaaagcgtaaagacataatacttagacatagaacatctaaaatgaatttatttcttgtagaagagcaattaaaagagttagatgttaagtgtaaagtaaaactaatttcttcggatgaagatgttgaataaaggaatagaggaatatctacgttaatcaaatttgaattttgtagaaaggagaaatgaaatgaattcatttttattagtgccaattatttttatggcatttgtatttctattcataatgctatgcttgttagtaaatgtaatttttctttattttgaaaaggaattacctgatttattgaagttggcattaccaggaatgcttacgtgtctaattttgcttttatttcttcattttataaaataagttatttatacaaatgttgtttactaattttatgaaatttgaattttgtagaaaaggggaatgagagatgttgaaaaaaggcgataaagtagtgatgcatacatgcggagaagcgcaacactatgacggtaaaatttggacttgtacaactgatgaattcgtaagaggtgaaggtgtatacacgcaaaacttagtttttttagaagaatttagtgggtgtttcttagctaaatatctccaaagggtaaaatttgtacaaaaggggattatttaatgaaaaatagaaagttttttatgaaattgtcatgtgttatagcactttctatggtaggaggatgctctagttttaacatatctaataaagaatcaacagtacaaaattcatcacaattaccaaaagaaagcgattattcaaattcaagattcaaggcaatagagcttgatagttatacacttgtcttaattgataaacaaacaaaagttcaatatttaaaagtagctcgaaatgaaggatttgatggtggattagatattgtacctttgtatcaagcaaatggtaaaccatatgtaggtaacgaagtgaaagacaatcgtttttccacaaaagaaatagatgattatacttttattatcactgatgaagaaacaaaagttcaatatttaaaagtagctcgaaatgcaggatttgatggtggagttgtaatagaacctttattaaatccagaaggcggattactaacagctcaataaaatttgaattgtttataattttttctacaataggaggctataaaatggatgcgataccagaattaataacaaagaatgattggaatttactatgttgggatgatagatatagtagggggatatgggctatagttacacctcatccaaaccatatgtataaaataagagagattatagatggtgaagggatgctaagtacggaattagggttttatttccagaatgaaggttcttggctccctgttgctaatggaaataatctaatggatgttttaacgaagctcgatgacaaaattaaaccgatgattggcaacactatatggaaaaggagtgtatatgacacttttcaacactttcttgaagaaaactatagtaatttcggcttggaaattgctcttaaaaataaagtgaagattttattaaaaccagaggaattataaagggttatatcaaaaaatgattttcaaatcagaaaggaataataatatgagtgaattatataacaaacgtattaagcaagcttatgaaaatgcaaaaggatctatggagattgaaggctttagatttacagattctgatgaaaaactaattaccgcttatctaaaaaaagaaatcacaaaagaaacatttattaaaattgcgagggagcgtgctagaaaacatggtaaataaatctctttacacatacgatggcacagatgttttaaaaaataaatttggtattaaggatcaagcggaattagaagaattagaaaaattgataactacggccaaaatcgcagaattagaaattaagccaatccagggtaattttgatcttgatcatcttaaaaagatacataaacatattttcgaagacatttatgaatttgctggccaaatacgacaagaaaatatagcaaaagatttcttctcttttggtgatgctagattcattgaatcaggggcaaaagaactatttggtcaactaaaacaagaaaattacttgaaggttatgagtccggaaaagttttctgaaagagcagcccattatctagcagaaataaatgtactacatcctttccgagaaggaaatggtaggagccaacgtgaattcactagaacattggccaaaaatgctgattataaaattgaatggaatagggtttcaaaaagagaaatgatggatgcgatgattaaatctcatgtaaacacaaaagaactcgaaaatcttattaagtcagtgataacaccaatacaaaagaaccctgaaaaaacattgattagaaaccaaaataaaagtttggaaaggggataaatctatatgcaattagactattttagtctaaataaaatcttaatttggatcggcataggaatgttgatatgtttctttctaaaaaaaataagtaattatattagcaattggttctatctaaggagattatataaaggcagcgatatatcgaaaagtaagtgtgaaaaattttatgtgggtgaaatttcgaaagaagatttaggggaatgggagaaaacgcttaaagacttagatgtcttaattcctttatctaatcgtaatgaatctataccagctattataaattatgatttagggataatgtattctacatctaaagagatgttttcagagtatctcacattatatcatccagagcatgaaaaaataagatttcaatctgaacaactaacagagcttagagaaagaattcttcaaaaatatctacatgaattaatttatgaatccttaaattgtttggataatgaattagataatgttcacaatataaaagagaaaattgccagcataatagatactcaaaatagtagcaaggattatattgtatcaaagagttgcgaagagatttcgagtgaagaactaattaatgtactaagagaaatcagccagtatgtaccttgtattaaatttgaaacatggcacaaacgattaagtttttgtataaaaattgctgaagataatcaacgtttatcaagagagggaaaataaatatgtatatgacggtagaaattaacatgcatttaaatagaaaattatcacataaggacacgactgctatagcaaagaagcttggcgactttggaacgatggatgattatgtgaattttgaaggggattcacttatatttaaaatgactaaagagaaaaatagaaagtatataactaagctgctttcttttttagaacaatttttagaggatacggatgtaaacaaaataggaatgataagtatagaagcagaagagaataataatcttctcatttatgcctttaaaaagcatatttttattactattgaaggaatcaaagaggggaaaagaagctataaaatttttgatgtgaaaggcaatgaatataagtataatatggaaggaacagaacaagttcctattgaaaatcatgtggctgcaacatattttttacattattgtaaataaggtttttaaagtagagaggattaaaatgaaattcttcactttttcttactaaaaggaaaaacatgttccttagagaacatgtataataagaacagtaagagaagggagaagaacacatgagcgaacagggatattggagtaaagagatctctgagctattacaaattggggatagtacactgagaaagtggtgtattgctctagaaaatcaaaaatatatatttattcgtggccgaaataatagtagggcttttgttgataaagatattattgttttgaaacgaatgaaagaacttgtacaagaaaaaagtataaatttagaagtagcagcacaaatattagtagcaggtatgaatcctgaagaaagaacaatgggcgttcctgaagaggaacgccctggaaactatctacagaccataaatatagaagttcaaaagctagaacagatattagaacaacaaaaacagcaagaagattttaataaagcacttttaaaaaaacttgaagaacagcataaatactttgaagaacggatgaacgaacgggaaaaaagggcagaagaacgagataatttactcttacaaaatataagagaaatgcaagaaacaaaaaaattaatagcagctagtgagcaaaaaaggaaaggcttttttagcaggttgtttagaaatacttaacaaacggtaagataagtgttggagaattaaacgaattcattatttaactacatataaaagagtattcatgtagttattagcagattataaatagagaataaatgaaggtgatacctttagggaaaggtaatgttaggtgattgttttatggaaaattatataatttggttgaaagaacaaggaaaaagagagaatacaattaagcaatatgaaactacattaaaagagtttattcagtggtatgaagatacaaatggggttgtattccagggagagtcgattacacctatggatcttcaagagtggaaacaatttctaatggaagttgcaaaaacaaatagtggaaaacaattatcagtttctacagtttctacaaaaattggtcgagtaaaaccatattttaaatttttatatgaaacgaatagaacgcagacaaatctaggtgcaatggtaaaacaacctaaaattcaaaataaaaatgatgctaaatggcttgatcgtatttctaaaaataggcttatgaggtacctagaggatgttgaattaattaagaaaaatccttggaaaaactataggaatttggcaatagttaatataatgttacaggctggattaagagtcagtgaggtatccaaattaaaactagacgatattgaagatggttttatttctgtacgggatggaaaaggtggaaaagccagaaagattcctatgaattcagatgtagtcaatagcattaataaatggaaagaacatagacaaatacatcaagcttttaaagaaaatcaaacagaatatctttttgtctctcaaaaaaatggtccactatcagttgtaggaatagaaaatatctttaagacaattcgtaagcatacgggattggaggaactaacaccgcatgtacttagacatacttttggccatgatttagtacaaaaaggtattccaatttcatatgtagctgaattgatgggacatacggatataaatacaaccaaaatttatgttacagctggccagcaagaaaaacaagaagctgtagaaaagttagcctctggaaagtatacaaaatagtttctctacttaaaaggttgtagtacttggaaatatttcagtactacaaccttttaagtaaaataaattaaaagcaagaaacctttaaattatcacgggggaagaaatgaaggtggaaaaatgaccggtaattttcttgtagacagttttatacttattgcatcggtaggatatttgagttgtattttatacaagctaattataaatataagtgaagatgaacatgaataatttattaacacctaattttatagataaaaatacctaattaattaatttttatatggtataatatacctaacgtagttctttaaagaactctattttgcaaatagcttagaatatctaaatctaaatttatttttttgaaaaggagtaatttaattgagagatattttacaagtgagagaaatttataatgtatgacggtgctttttttagaggatgtttcaatggtttaaaactagttgctccattttggttgattattggtttattagtttatatgaacatccagtaatggattataagtaatttttaggaggtaaattgatgggaaaaacattatttattgcagaaaaatataaagtagcacagaaactattaaaatctccacgtttcaaaaatttaaaaaaggtaaatggcacaatgccttactatggttattttgaaaatgaggactatattgtaagttggtgccagggccatttattaagattaaaatatccagaagaaattgatagtaagtataaagaatttgattttgaacatttgccaattcttctagaaccacatcttaaagttatagaagaaactgaagaacaactgaatatcttagtagaactattaaatagagaagatgttgatttagtggttaactcatgtgataaggacaaggaaggagaattaatctatcgtgaagtttatagctatgcaggcgtagataaaaatgaaaaaaggatattcacagcatcatatgagccagcagaactagaggcagcgctaaataacttgttaccaggagaagagtttgatgcgttagcatcggcagcaaatgcaaggcagtatttagattatgcccttggaatcaatataaccaggggatgtacaactaaactagctaataatcaatttttattaagttctggacgagtacaaatgtgcttacttaatgaaatacgccaacgtgaaatagctagacaaaattataaggaacaaacttcttataatttaaaagtcttaacagctccaggatgcacagctgtaatgaaaactgaagaacaaattttagactcagctccattaatacaattagcaactagaattaaagatacacagttagtcgtaaaagaatttagtgaaaaggaaagaaaaaaacaatctaaatcactatataatttaacggatatttacaaggatgctttagcaaaactaaagatcagtcctgaagtcgctaataaacatattcaacatctatatgaggaaggatttatttcttatcctagatcatcatcaagacatttaccaagggaacaagttaataaagtaaaagaaataatcactgttctagaagaatctaactataaagaatttgcaaacatgattgatatttcaacggtttctgagaaacattcatcatttaatgatgaattagttaatagtcattatgctgttattcctacgactaaaaaatatgatggtgcaaataaaaatgaactagagcaaaaactatacgaacttattgtaaaacgatttattagcaattttatgccgcctgctatatatcttgtgcgtgaagcatcctttgttgatcaagaaggtaatgaatatgtatcaaaggaaagacttttacaggaaaaagggtttttaagtgtattccaagaggatgaagaagacgacgacgtaaaagaatttaaaatcccaatgctaagtgaaaatgatcgtttattaattgttaatcatgaattaataacatctaaatctaaaaaaccagcattacatacggaaagtacaatgttaacttttatggagtcagccggaaagaaattagaggatcaaaacttgaaagaattaatgaaaggaaaacgtattgggactgtagcaacagaagctaaattcatcccaaccttagaaaatagaggatatattgctattgaaaatggaaaaattagtacgactgagattggaagagcatttgtagacactttcccagtagaacaggtaaaaaaccctgagtatacagcggaattagaaggtatgattacatccattgaaaataaagaaatggactataacgaatttgtcttgcaaacaaattcgtttgtagaaaaggtagttgaacagttagggaatatagatagtaatgtggcaattagaatggtaaatacccataataaacaaatagaaatatgcacttgtacatgtaaaaagggaaaaatcattaacaaaggaaaattctatggatgtagtacttatccaaattgtgaaatgtctattcctaaaaagataaagggaaagaatattccagaagaacaaataaaaaaactttttaaagataaaaaaacagatttaattaaagggtttgaatcagagaaggggaaatttgatgcatatctagcctttcatgaaggaagggtgcgattagcactccctacaatagatgaattatcattaggcagatgtccaaaatgtcagaagggtaaaattctttcaaaagaaaaattttatggatgcagtgattataaaaatggttgtgattattcctttcctattaaattaaagggaaaactcattcctaaagcacaaataaaaaaattgtttagtgggcaaaaaacagattttatcaatggatttcaatctgaaaagggagaatatacggctgcactacaattaaaggatggtaagccaacatttatatttcctacaatagatgatcgtacattaggtaaatgtccactttgtagaagcagggtacttgtaggaacaacaaattataaatgtgaacactataataaaacatgtgattttaagattaacggaacatatctaggtaaaaatattacaaataaccatataaaaaaattattagaaaagaacttaacagatatgataaaaggtctcaaatctaataaaacaggtaaagaatttgatgcccgattatcatatagcgtagcacaaaagcggttaacatgtatttttgagaaataggataccagtttatattttcatattgctagataaagggagtttgaaaaatgttgagatctagttattgtacttcgataggataccatattggtaacctagaagttgaaatagtcatagatacaaattatcaaacaaaagaagaagctgaaaaattggaaaataacacttctcttcaccaggcaaagttagataaagaaaaactagtaataaatgattcaattattataaacaaagatgatattgatagataccagtttagattatgcaaagtatggaatcccattatttcagctacagattttgaagcagtttcatgggatgaagcaatacaatatttatctaaagaatctggattcaatatgttcaatttggaatcttattactttgaagtccataaggggaagcatatagtaactaagtaatagggggcaaaggaatgaataataatactttcatagtcagtcctagtaaatttggtgtaagaagagaatattttatcccaagtttactattggaacaaaaaaagagcttaattgtatttgataataacgtaaataactcatatgagtatacaaataaacaaaaacaggaacaaggatatctagtctttaaatacgatgtatttgatgaagaactatatataaaattgcagcaactactaacagataaaaataatcaaaaatatatattctatattcagcagggagcttttacattaaaccaggaatttagaactaaaaatggaaacgaaaaaatgggagagttatttcgaatgattctagaaggggtaccgccacatgcccatcaacttaagaatttgcactacccccaagtgtcaaaaaacgttattccttcttgatgttgcctaacttttttcaaaatgtcctttacaaagggtacagattacactactcttccttttctttatgaactttcaatttttaagtataaattcccgtctttcccaaaaactaacacaagtaaatgatgtaagttaggggtgagaaaatgttcggtttatcatctaagaaatcaaaaaagactaatacaaaaacactttgttctatcccagaatttatacaaaccatgaaagaatcaagcgattttgtctcttataacatacttaaagatgaaacgttgtgcttgttttattataaatctgtcgtggaagcacttattattaaacaattcattttaactcctataaaaaaggaatcggaacaaatccaaaacatctctgatttatgtaatattatctctattgaagacattattacctccccttctattgatgatattcgtgaaaaattattaggtggatatattttaatacgcttaaaaaacgattcgaatcctgatcaatatgctttaattcgtgccgaaagtactgttttaggaaaacgattatataacgatacagaaaatgagtatagcgtaatcgggcctaaaatcggtttcgttgaaaaccttgatacaaatatccacttattacgccgaaatatcgtaacggagcaactcatttttaaagaagttaccgtcggatctatatcaaaaacaaaagtagcagttgcttatatagaaggaattacaaatgaacaatttgtcaacaccgcaattcaacggctagaagacattgactttgatgtcccatttgattcaactatgattgagcaatttattagtgataatagcaattcaccttttcctgttctattacctacagaacgattagatcgagctgtatttgcattaattaacggggaagttttaattttaacagatggctctccatatgctttatcaggaccaacaacgttactggattttttcatttcaccagaagattattatttaccgtggatgattggatcgttctttcgtattattcgttttttcggagctatattttctcttttttcctccgctatttatacagcggctttaacatatcattatcaaatgatccctgccgatctactaggtcctattattttctcgagagctaacgtaccttttcctcctattctagaagcactctttttagaaattacaatcgaattgcttcgtgaagcaggggcgcgtttaccaacaaaagtcggacaaacgatcgggattgttggggggattgtaattggccaagcatctgttgaagcagctttaacaagtacaattttattaattgcagttgctttatccgcccttgcatctttcacaacaccgactgtaaagatgtcttctactatccggttgttacgctttccgcttattctcttagccggtgcattcggaggattaggcctcgctgtcggatttgtatttattttagctcatttaattaaattaaaatcgcttggatcaccttatttgttacctttatatccatttcgtggtttaggtacagcagaaggttttcttcgattaccatttagtcaaacggcacaaagaccttcttttcttagaccaaaatcaaaatggcgctacaatccaaacaaatcgaagcaaaaacgtgatggtgagaatgaatgaaaaaaattttattgcaccttatcattatcttcttcgttttacaaactggctgtacacaaacgtatatagtggatgcacagcgtattattcatattgctggatttgacatcacaaaaaacaaaaaattccaaggaactattctattcccagagtacacacatggtgtaaagtctaaaccagagacgcaaacaacatctgcccgttcacttgaaacaattgcttcacgattaaatgcgaaatctcctcacaatgttgttgtaggtcaaatgcgtgtcgtcctatttggaaaggctctaggggaacgcggaatgggagagattattactaacttacaacgtgacccaaatatcgggcgtgatgtacaactagcaattgtagatggatcggctgaagagcttttaaattacgggaaaaaaaatgggtctttatatattgctgatttactcgagcaaaatataagaaatgagaacattccacaaactgaattaaacatttttttatataattattactcttctgtatgtgatgcctatgttccttatattaaaatggacgataatcattctgtcgctgtcaaaggacttgcctttttaaaaggcgataaagtcgtcatgtatacggataaaagacattctgttttagcaaaattacttattaatcctacgaaaaatggacgttacgaagcagcaataaaaaaggataaacataaaggtatggttgtgatacaaaacttagctgggaaaaacaaatatgatatagatcaaactggcgacataccaaaagtaaaaatccatttaaaattaaatggattaattaaaaactctcctaattggattgatttaagaaaagaaacaaatatcaactatataaaaaaacaaattgaacgaaatgtcgaaaaagactgtgaagatttaataaaacaatttcaagaaaaggaaattgatccgttaggaatacgagatgaaattagaagccatacgagaaaatggaatataaaacaaattcgaaatatgtataaaaatgtagcggtagatataaatttagatcttaatattgtacaatctggaatcggagaatagtgaggtgaaataagcaatgaatacaatgaataaaacaaagacagtatctccatattttgcatttattttattgcattctctccagattggtataggaattctcggatatcaacgtgtaattttgaaaaatgcaggttatgatgcttggatttctcttattattgcaggtattgcaactcatattgtactgttttgtatgttaaaaatgcttgaaaaagacggagatttaattagtattcatacaacaacctttggaaaatgggttggctctatattttctgtaattttcactctttattgcttattattttgccttactgttcttcgtacatatatggaagtgatacaagtttggattttccctaccattaagttatggaaacttacgcttatgtttttattagtcacttactacattataaaaggtggcttccgttctgtgacagggatatgtttttggggtattgttcttcctatgttcgttgtattctttttagtctatccgatgaagtatgcacattttcgtaatattttacctatttttacacattcaccttttgacatgcttatatctgcaaaacactctgcattggaatttctagggtttgaaacaattcttatcttttatccctttattgaaaaaggaaaatctttaaaaagatgggcccatgctggaattgcttttagcaccttaatttatgtagttttagctatcgtatcttttatgtattacagcgagggacaattaaaccgtactatttggcctactttaacgatgttaaaaataattaaagttccttttattcagcgctttgaatatattattattttcgtttggtttttaattattttaccaaacctttgcttaaccatttggtcatcatgtcaaacgatgaagcgttcctttcatatttcatttaaatttacattaccgttttttattttcatcatattttcagcttctctacttttcacaaaccgtgaaagtatcaacacattaaataccgtactatctcaagcgggtttatatattgtatacgcttatatcccaattttatttctattccattcgctaagatggcgcttcaaaaatcagtcaaaaaaatcttcaaccgatacaccgtaatctctgatacaatttgattaatacatttgtaaaggggacaagcgaatgaaaaagtatgtattttctttacttgcagtactaagcttaattcttgctggatgcggaagtactggtacaaatgaccaaaaatcttctgaatcaaaacaagaagaacatgaccacgcatcgcacactcagcaagctgacattcaagagaaaacaaaaggagtcgacacacttccaaccttcctagataagcttgatccacaaatgaaagatatctacaccgtcgctggacaaaatgcagagctattagattggattccatgctattgtggttgtggtgaaagtgtaggacataaaaataataaaaactgctttattcgtgaaattaaaaagaatggtgaagttgtttgggactcccatgcaacgacttgcgtcaattgcctagaaattgcagttgaatctgcttccatgaaacaaaaaggaaaatcaacgcttgaaattcgtaactatatcgataataaatacaaagaaggctatggcaaaccaacacctacgccaatgccaaaagcttaaaaaacgagggaattcctcgttttttcttttcattctcattttttcttaacaaattctttcaagtgtatttctccttacttatcacacactatatataactctcggtaaggagggtacacagtgcaaacatataacgactatgataaagctctctattacacgtattgctgtaattgggataaattactcgttctcatggttcaaacgaacgatcaattattttctaagcgtattgagcattttttacacgcttatcaatacagcaaggaactgccagaagttgataaacaattgcagctcctatttcaatatattgaccacgcatcccaaaagtcgcatgtagaagaagtagaacaaattcaaatgtaaactatagcgctattctcttccggagaatggcgctttttttaaatttttatatcaataaaagtttctcctcataaaacttttattgataaacatattttttctttcttttccataccacttcatactataatttagtatgtaactattataagagaggtataaaatatgggacgagaaaaaaagcaagaatatgctttacttaccgcatggggagcttcttttatcgctacactgggaagtctttatttttccgaaatcatgaaatttgagccttgtgtactttgttggtatcaacgtatttttatgtatccattcgttttatggctcggtatcgctgtagcaaaaaaagattatcgcatcgcaagttattctttaccaattgcaagtattggtgcttgtatttctttatatcactatgcaattcaaaaagtcccagcgttttcagctgctggagcagcttgcggtcgtgtaccctgcaccggagaatttataaactggtttggttttattacaatcccgtttttagcacttatcggctttattacaatcgctgtttgtagctttattgtcatcaaaaacaaataaggagatgaaagaatgaaaaaaatgcttatatttggtggtattattatcgccttgttcgtagcaattttcgctgtcacacaaatggaagaaaaaaatgctactagccaaaagattgataatcctactgaaagtaagacaaacggtcctgactactacacaaataaaatctctctttcagatcttcaaaagaacttaaaagagaaaaaagaagaaacagtatacttttatcaaacatcttgcgttcattgccaaaaattatctcctgtcctcgtgccaatggctaaagacttaaacgttgatatgaaagttatggatattgaaaaattagatgctccttgggatgaatataaaattcaaggaacaccaacaatcattcattttaaagatggcaaagaagtgagccgtattagcggtgaacagccgaaagataaattaaaagaatggcttgagcaaacgaaaaagtaactagaaaaggaaactccttctacacatgaaatgggtgtaaaatcccacactaatgtataaggagggggttttatgccagaagtaagatgttctgtttccaactgttctttttggggacaaggtaacttttgtcaagcaagtgcgatcatcgttcagcctgatgcagatgaaactggtcaaactgaaaatgattcatatacagctgctgttttaacaaacgagacgctagaaagttctgtagcaacgagtgtagaaacttgttgtcatacatttaagcctaaatattaaacaaaaaaagcatgcgattaatcgtatgctttttacattcccctccaaaaatcatgcataataaaaaagtacaaaataacgagaacggccgtcccgcataaggtaatgcgccgatatatactcttctctccttccctcgctttcacaaacgcccaaataaatccgaagaacaatattaaatcaacatatggaacataaaaagaaaagacgagaaacgcatataaatacacgataaataaacaggtcgttactaaaaaaactttaaacgcaaattcacttttcataatataaccgccccctatctgtactgtattatattcagcaaaatataatagttgcagttaaactccaagtataaataagctaccgtctataaaacggtagccattacggaacattgtatttccgtttatatatattacttaaaatcgaagaaggaatttgctcgtaacgaattttctctcctgtttcatctataatatacgaattgtttcctatataatatattccatcttttcgttttgagtacactggatatctttcatttggcaataccgttttcactttcgttaactgtccatttggttcttgccaatatatatccgcgcggtctactaacgtaagtactccaatttgttcttcttctattttccgactattccagctcacaacgcgataaccaagcttattcgcttcatattcggggctcgtatgaaaacgagaaatgattacttttgtttgtaattgtactctgtcatacaaccattgtatatccctgtcatgcatgcgaatacaaccatttgattccctacttccaatcgtccattcccgatttgtcccgtgaatcgcatattcattcttatctagtccaagccacctcgtaccgagaggattattcggtgcacccccaggtattttttttcgatggtattctttatttttaaatttagttataatacaaaagttaccttcaggcgtaggtgtacgatctcttccagtcgttactggaaatgtttttgtataatttccattctcaaaaaaagacaactgatttgtcgtaagattcactaatattaaatgatctgtattagcaaaagcactaaccggtaggatgaaaaataatagtatgacgaaacataactttttcagctatatcccccctagcgctcactataataagtggaattaacattactttgctcttataaatgaaaactatccatttacaataacgcccccatttacatgtatcatttgtccagtaacataagaagaatcaccagacgctaaatatacgtatgccggcgctaactcatatggttgaccaggcctttgcattgggacattgctcccaaactgagagactttcttctcatcaaagctcgatggaataagcggtgtccaaatcggtcctggtgcaacaccatttacccgaatccctttttgcactaacgattgagaaagtgatcttgtaaaagctacgattgctcctttcgtcgcggaataatcaattaacgtttcatttccttcatatgcaacgatagatgccgtatttataatgacatcccctttcttcaaatgagaaagggctgctttcgcaacgtgaaaataagaaaaaatattaatacgaaaagtcttttctagctgttctgctgtaatatactctagtccttgctgcggatattgctgcgcgacattatttaccaaaacctgtaaactacctagctgctggacggtctcttgaacaacatctttacaatgctgttcatcacttaaatcacccggcaacaatacacactttacaccttctttctcaacatattgcttcgtctcattagcatcttcttcctcatctaaataagcaatcgcaacatttgctccttcttttgcaaaagcgatggaaactgctcgtccaattccgctatctccccctgtaattaatacattctttccttttaacttttcgctacctttataattgggatcttcaaactgtggtagaggattcattaatgattcaataccaggctgcttattttgatgttgcgcaggcattgttataaagtttttttgctgtggcatagctgctttcaactccttttccttagcatgtgcacaataaaaagctgaaattcacacatcggtttacgattaatattcgaatttaagacacaaaatatgaattgttataaactttttatgcaaaactattgcaaaatagataaaaaacgaatattatatataactgttgtgaaaattattcgtaaacagaaaggatgtttatatgtttaacctttcaaaacataaaacttctattaaaactgaaattatggcaggtattattaccttcttaacaatggcatatatcattgtcgtaaaccctgttatccttggagatgcaggtgttccatttgaacaagcatttacagcaacaattattgctgctgttgtcggaacattatttatggcaatctttacaaacttaccaatcgcaatcgcgccaggtatgggattaaatgcttacttctcttactctgttgtaaaagcgcatgaaggcatgactttcgcaattgcattctctgctgtattcgtagcaggtatgattttaattttgctatcatttacatctttccgtacaaaattaatggaagcaattcctgaaaacttaaaacatgcaattactgctggtatcgggttatttatcgcctttatcggtttacgattaactggtatcgttacaaaaaatgatgcaaacttagttggacttggtgatcttcactctgctccagttctactagcattagctggacttggaattactattatccttatgtctttaaatgtaaatggcgcactatttatcggtatgctattaactggtattatcgctttcttcacaggacaattaacattctcaaacggtgttacatcaatgcctggattaccagaaggaattatcgtttcaaatccaattactgctgtatctgacgtaattaactacggattatacggcgttgtattttcattcttccttgttacattatttgatacaacaggtacattacttggggtagctcaacaaggtggatttatgaaagacggaaaactcccaaaagctggacgagctcttctatctgactcattctcagcaactattggttctatgttcggaacgacaccatcaacagcttacattgaatcatctgctggtgttgcagctggtggtcgtactggtttaacaactgttacagtagctgttctattcgcactagcagcattcttcggaccattagtaagtgctgtctctggtgtatcagctattactgctccatcattaattatcgttggtagtcttatgatgggttcagttcgccacatcgattgggacacatttgatgaagcattcccagcatttttagtaatcttaagcatgcctcttacatcaagtatcgcaacaggtatcgcacttggatttatttcatatccacttatgaaagtggcaaaaggtaaattccgtgctgttcacccacttgtatatgtatttggaattttgtttgcttatcaattgatattcttaccacattaaaaaagtagagcatcgaaatccgatgctctacttttcttttacaacaatcattcaaactataaaggcacctccaaaatatgaagaaggttataaccttttaatacttctcttctacctttaattctttactatacttttgaatgaaaactgatgaaataaccattactatgcccacactaaaaccaataagttgatctattaacatttcatcatgaataaaccagcgaagtaaaaatacgctaccaaaaataaacatcataataaacccagtatgcctaagtcctttatagacattttccatatgtatcacctcttcacatagcattatccatattataccatacaaccatcaagtaaccgtatcgtcctctgacaatatgcagctaccttttgatcatgtgtaacaactaacactgtttttccttctttattaatctcttgtaaaatactcataattttctccccattttcttgatcaagagcaccagtcggttcatcagcaagtataatttttgtatcttgtgctaaagcccttgctattgctgttctttgctgttctcctcctgataactcgtaaggatatttgttaatatgcctctcaagccctaccattttcagcatttcttttgatatttgcatacgtttcttatgagaaattcttctatatataagcggaagcattacattttcaacaactgtataatcatctaatagcgaaaagttctgaaacacaaatccaacttccgtgtttctatacttatgataatttgacttgaatgtactcgtatccattccatctaaaaaatactttccagtagaggggctatcaattaagccaataatgttaagcaaggttgatttcccagaaccagatggtcccataatggctatcatttcgcctttttctattgtaagattaatatcttgtaaagcactaaaattactctttccgtatcccttagccacatttgcgagctgaatcatctataacacctctttcatatatgtattttttatttttagtacattgaaataaatgattgcatatataacgaggatcattacaattgataaagcacctataacaaccaatgattctatagagacttttaacgttccaaagaaagatactatactattttctagccctttctgaatttcaattactccgctattctcccattgaaaatacattatgcctatacatatcgctaaaacgaatagcaacatatactcaataataaatggaagacatatttgaaaagtgcttgcacctaacgctgatctaatagaaatatttttacgctccatataaagtgctgccattgatgttaatacaatagatagaaatgaaaaaaataagactgtaccgcttaataataaggggtatgacatattatcaataccttgtttttcgttttctaacaatttattcggatttgtaacataatacgaataacccttaccttctgttacctttaatactttcttttgaagttcatttatatttatcttatcatttgtttctataattaacccattgtataaaagttctacactatagaactctatttcttctgttccaattggtaaaatcgccatgtcatctaataatgtaatacgattatccgatatttcaccacttcgaggatatgtaaatggtgaatttttttctaaaaaaccaattacttttagcttcatttttaaagatggtataacatcaccaatagataccttttctatataattagcccctaatataacaggtctaatatcaaatactgatttatgaaattccgattcctcaaaatatcttccttgtgaaattcgtatacgaaagtacttattaatatctttatcaacaataagagtctttatcgttccattttctttttttaaactaagtgaatagttacggaacagataattagttttatttgttattggtatcatattagataacccttgcatgaaatgttgataatcatttttcgctttttcttcgctaaacaaggttatatcttgcgtcgcataaagttcatagaaatttttatgagtcgataaattatttgctaccgtcatcatttttcgatatcccgaaagattactaacaaattctattgctgaagaaaatgcaataattaaagaaattactataatcaaacttggtaacaaccgttttttcacagaccgtatagaatcaaatataaaaaacatgacgacctcctacgttcttaaatgttttccgggatatatatttataatgtgcttgattggaattacagtaacaaaaattgtaagaaaaattataaaaataacattgcatatcaatacatatagtgttaacggttttactaagtatgtctgaaaataagtatgaattgttcccgaaaatatttctaacgtaataaaaactaagaacatcgctgctagagaaataaacaaaatttgaatatatagttcgcagtagatagatatattagaagcacctactgctttttttaatgaaatctctctttcttttttataaatccaaaataaaaccgcagaaatgccagaaacaattgcaacaagaataaatttataataatacttatttgctggatctatatgtgtcacatgtagttcttgaagatctcgttcattcagcatttgaacatctcccgaaagcacttctttactcctacccataaacttttttatttcgttatgaatagatgatgtaggattaacaactgttaattgtaattgtttactctcgataataccttttttagatatagtaggtaagttttgaagtggaacgtatatgcctgctacacctacgtcactgtcttttcttgatatagttcctatttttttatatgtatcatcaaattcatataactcctctacattcgtttgatcgccaacaaccatatcgtttacattttcacgatgaaaatattgtccttcagaaatatatggcttccaataataatcatcttttaaattcacagctatgatctttgttgcccctgaactatttaatacttttaaatgctctacataaatatcacttttaacaaaagtatcttgtatgaaaggaattatctcttccaattcagttgcattcgctatcggaacagttaaaacttggttcttctctggaaaaccaatttgaaaagcagatataaagtttcgtttagactctgttaaaagtgcggctattgatatagaaagaaaagaaataaaaaatgacataaggagaattaagaaaaacagtttattgctttttatatttttaaaagctaggtacatgtctgtgctccttttaaataagaaggagatgatgaacatccccttctccttatctaaatatttataaagacagcggtttaatgctttttaccactgtaatcataagttaccattactatcaaaagtacctttgtgtgtatcttcttgatagtcattattctcatttgcataatgctccgagtatagtccttttgcaccaaaggcgttatatgcaccattactcacagttgcgtttaatgctcttccagattcatgggatcctaatttgtctgaagcgctttcaatatatgaattatttccatttgatttaataaaagaaattgctactgaacaacgagatgcattttgattcgtagtagtttgagctctgtaagatagtaggttaccgcttttgtgaccgcttagagttggatagaatgcacttgttgaggttgatgttgctaataatactaaagtcgtaattgaaaaaacttttcctttcattaacaatcacctcataaatttaatagtttagtagcgctacatcatcataatatcctttaaataaattctcctcaacaaaaaatcccaatgttttacaaactctttaaacacttaaacattcatacatttttaaaaagtaacgtataagtagcaatataaaaaagctgcggagaaactcttctccgcagcctaatacttatttttgcaagaacgcctttaaatctgcaaactgtctctttgcatcttcatagccttgctcgtataaattttgtagttttgctttatctttttccatacgatctacttgaagcggcacttctgggcgaataacaaataaattaccagcttgctcttctttttcaatatagtgaagtgtttcattatacacttcataacgattgagcatcgtgttaacaagattcggatattttttataagctttcgcagcaacccatccaaaccttgattttttcttcgcgtagccatgatttctcgttaaaataacgactgattttttaaatccatcctcttgcgctttacgaactggaattggatcagaaatcccgccatctaacagttgtttaccgcggtaatttactaccggtgcaatgaaaggcaatgaactagacgcttgtaataaatttagcgcatcatcattcgttccttctttttcaaaataaacagattgccctgtttcacaatccgtcgttcctacaaggaaacgttccgggctattaaagtatgtttcaaaatcaaacggcacatacttttctggaatttcatgaaaaatgaaatccatatcaaatagctgacgttttctccataagtttttatacgataaatatttcggatgtgatgcataatcaatattgaccgttttatttctatttctttgtctggaaagatacgacgctgcatgacaagcaccagctgatacaccgattacatatggaaaatataaatcttgttccataaagtattctaatatcccgcccgtgtacacaccacgcataccgccgccttctaatactaaccccgtattttcaagcatgttactctctcctctatatatattgactctttaattattcaccatgttaagtatctttttctattatatatgagttctttcagaaattatatttaaaagacttgagaaaaaggagttttttcttccaattatatttccaaatgatcggagacatcctttataaacctttgaataaagtcttgctcttctttcgtatatccatctaaaagtaacaaccacttttcttcagcttgcttatgcaatttttcatgagctttatatattttattcccactttccgttaagcggaagaagatttctttttgattatctaacatttgcatcttctcaacgaattgcttttgaaacaactttgtacaaattttagagattgctcccttcgtcatgcccatttctgtcgtaattgccgttacatttatcaaaccattttttccgatacattcgattacatgtaactcagataaagacatactacttacacctgtctcacgaagaaacttctcattttgtcgttttaaatgttcttcttttttatgcaaaagtgtacgaatgtccgaaagtatttccatttgcttcgttgcatgcttcaatccgttcgcctcctaagtttccaaagaaacaatttaactatataccattttaaaaccattttttcatctttacaagtgagaaaatcatgttaaaataaatttagtttcctaggaaactaaataataaggaggttaacatgatgaaaaaatctaaactaacttttattttatatgttgtctgtattagtgccttattcggttccttcgctcaaaatatttacacacctatcttaccgatgattcaaaattcttttcatacttctctttatcttgtaaatgtaacagtttcactttttacattcgttcttgcgattatgcagctcatatatggccctttaattgatacaaaagggagaaaatctgtccttattcctagtttaattattagtacgattgcttcaatcggatgtgctttttcggcaaacatttatttatttctcttttttagagctgttcaagctataggaatagcggctatacctgtagtttcagcaacgattatcggcgatttatttgaaggaaaagaacgcggagaagcgatgagcctataccaaatgttacttgccctcgcacctgcaatggctcctctcataggtggttatcttggcggtataaatggtcacttatctgtatttctctttttatctacacttggcattatcttattaatgataaacatttcactacttccagaaacaaagccaaatgtaattaagcagtctaaagcacaaaagaattactctcttatcttaaaaaataaaactggattttctattactcttattggcttcattcaattttgtatttacttttgctttctcgtttttttaccgagtattttaacaaattcatttcatttaactgtaaataaaattggtcttatgtttgtaccaatgtctctttctatcatgctaggaagtttttgctacaagtttttgcaaaaacgcctcacaacaaagcaagctttatttattacgagtttcttcaatattatatgtgtcgttttattctctttcacatatagcatcaatatcccattcatcattatcgttacatctttgtacggttttagtatgggactttctatgccaactcacactactttattaacagaagaattcgtacaagaacgtgcaacagctatcggtatatacaacttcatccgctatcttggtatgggtacagggccacttataggtggatttcttttatttaaccaaaattacttttggattttcttcctaggcgcaattatgtttttacttgtaatcttatatgcaatgaaaatgctaagttttcatgctgtacaaaaattaaaatagagcccccaaaatgtcggctctattttaccctctttgatccgcaacaatatgaatatcaatatactttgtttgtctcataatttcatttacaatagagccttttcgtatttcttcccaccttgttcttgcagattgtccaagtaaaatttgcgtcacttgtaatcttcttgcgacttcaataataacatccgctggttttctccctttcgcctcttctaatacaaaactcgcatcaaattgattggttaacgatttccactcttcaatcgtctgcttttttccagctgaaatagaatctatattttccctctcaacgtttaatacgtacaattcagcatttaaccgatcagccatgcgccatccccgtcttattaatttctccgctgttgaactgtattgtacacaaacgagaattttttcttttacgccaattggttctattactgtttggctaattttctcgtccatatcatcggcaacttctcgaagtgataattccctaagtgctcctaaattattaagtgtaaagaagttttgtaagctttgctgaattttttcttctttatatatctttccgtctattagtctcttccttaatacctcaggcgttgcatcaacgagctgaatttcatttgctttttgtaaaataaaatctggaattcgttctcttacttttacattcgtaatttgagctacaatatcatgaacactttctaaatgttgaatattaaaagctgataataccgatataccagcctctaacaattcctgcacatccatataacgtttcttatgtttagaaccaggaacattactatgcgcaagttcatccactacgactacttgcggcgcgcgtttttttattccttccacatcaagctcataaaatacctttcctttatactgtatttctttcaaaggaactttttctaaattagcaattgcttcttccgtctcttttcttccatgcgtttcaattaaaccaattacaatatcaattccatcttttttcatttcccttgcatcaaagagcattttataactttttcctacgcctggagctgctcctacatatagctttaactttccgcgattttgctgacgaatatattctaaatattcctctggcgttcgcctttgaaacttcggttcataatcatctgcatacaaaataaacactacctttcattcgaaacaacgctacctcaatcctttagattgaggtagcactgttgctattttattaatttctgtaactctaaatttaattttaagacgttcacacgatcttctccaaacaagccgagtgcagcgccttccgtttgatccttaatcaattgattaagtttttctttcggaatattcgttaatttcgagatgcgatccacctgcaccgaggccgcctttggactaatatcaggatcaagccctgaacctgaatttgtcactaaatctatcggtacttctgtaactggaacagctggatttttttccttccagtccgcaatacttttctctactcgctttgctaaatctggattagatggtgcatagttatttgaaccagatgcttcagccttatattcaatactagaaacacgcccttgaaaataacgtggatccgtgaagttttgaccaattaatttagaaccaatcacttcatttttatcattatatattagacttccatccgcattatccttcatcactgcttgtgcaataccagtaacaataagtgggtatacaagtccacacaacactagaaatgtaaaagtaatacggataattggtgatagtatactttgtttcttctccatctttttcccctcttccttatataaacaagccgacaatcatatcaattaccttaattccaatgaacggaacgataactccgccaagcccataaataagtaagtttcggctaagcaatgcattagaactcatcggtttatatgcaatacctttcatcgctaacggaatgagtaatggaataataacagcgttaaatattaatgctgataaaatcgctgacagtggtgatgttaatttcataatgttcaatgcctccatttgcggaatcgcaagtgtaaacattgctggaatgattgcaaaatatttcgctatatcattcgcaatactaaacgtcgttaaagcacctcgcgtcattaacaattgcttaccgattcctacaacctcaataattttcgttggattcgagtctagatcaatcatgttcgccgcttctttcgctgctgtcgtaccactgttcatcgctaatccaacgtccgcctgtgctaatgctggagcatcatttgtaccatcacctgtcattgctacaagtttccctttatcttgctctgctttaataacagcaattttatcttccggtttacactcggcaacgaattcatctactccagcttcttttgcaatcgttgctgccgttaacggattatcacctgtacacataaccgttttaatccccatttggcgtaactgttcaaaacgctcacgcatacccggttttactgtatcctttaaataaattaaaccataaatacgattatctactgcaactacaagtggtgttccaccctcttttgaaattaagcctgctttttgatttacatctttcggaattattccgccttgtgactcaacccattcaataacggcacctacagcaccttttctcactttcgttccgtcttgtaaatcaacaccactcattctcgtttctgctttaaacggaacaaactcaccttgttctgcaagttctctattgtatgatatagattttccctgcacatactcgataacagatcgaccttctggtgtttcatctaaaacagaactaatagcggcccactttccaacttgctcaatcgtttcatttcctacaggtaataatgtatgagccattcggttcccaaaagtaatcgtacctgttttatctaaaataattgtattaatatcgcccgcagcttctactgctttccctgacatcgctaacacgttaaattttgtcacccggtccatcccagcaataccaatcgctgatagcaaaccaccaattgtcgttggaattaaacaaactaataatgcaactagcacagcagtatcaatttgaaaccctaaataatttgtaaaaatcggcaacgtcacaacgacgatcaagaaaataagagttaagctcgttaatactgtatttaaagcaatctcattcggcgttttttgacgagcagctccttctactaaagaaatcattttgtctataaatgattcaccaggattactcgtaatgacaattgtaatttcatcacttacgaccatcgttccacctgttacggaacaaaaatcaccgcctgcttcttttataacaggagctgattcccctgtaattgcagattcatctacagatgctaatcctttgattacttcgccatcattcggaatcatttctccttgttttacgataacaacgtcaccttttgtaagatcagttgctgaaacttggacaatgtctccattttcttttacaacatttgcaaacacatctttcttcgactgctttaaagaatcggcttgcgctttaccacgaccttctgctaatgcttctgcaaaattcgcaaataaaactgtaaataatagaatgagagaaactgttatattaaaccaacctggtatactactagaactacttggaagaaaagataaaatgaacgtaatgataaatccaatttccacaacgaacataatcggattctttatcatgactttcggattcaatttcgcaatggattgcttcatcgcatgtgttacgatatcacgatccatcgttttcgcttgtctaacttcatcttctacagcatgtatttgtgactcatttaattgtttttcttttactactaccggtctcatcatttaccctccattacttcaatgtaagaaattctgcaattggtccgagtactaacatcgggaagaatgttaatgcaccaacaattacaattgttccgatgaagatgccaccaaataaactattatctgtacggaacgttccgactgtttctggcactaccgttttttctttcaacgaagctgccacagctagcatcgtaattaaactgaagtaacgtcctaaaaacataactaaaccagtcgtaatattccaaaacggtgtattatctcctaatccttcaaatccagatccgttattcgcagctgacgatgtatactcatatacaacttgcgttaaaccgtggaaaccggaatgagaaatagcatccgtccctaaatttgttgaaagagctaatgccgaaaagcctaaaatgagcaatggatgaaataaaatcgtgaccgcgattaatttcatttccttaccttcaatctttttacctaaaaactctggtgtccgtccaaccattaacccagatataaacaccgcgataattgcatacataataatgttcacaaagcctgctccaacgccgccatatactgtatttaacatcatatttacgagtggtactaaaccaccaattggtgttaacgtatcatgcatcgtattaacagcacctgtttccgcagcagtcgttactgtcgcataaagggaagaaaatactgttccgaacctcacttcttttccttctgcacttccttgtacatgctggatacccatttcatttaatactggatttccatgtaattcagatgtcgtaattgtgataaatcctagtaaaaacatcatgaatagtgatacgaaaaggatacgaccttgctttttatttcctaccattcgtccgtacgtaaacggaagtgcagttggtaataacatcataagcatcatttgcaaaatattactcatttgccctggattttcaaaaggatgcgtagagtttgctccgaaaaatccaccaccgttatttccaagttccttaatggacacgaatgatgcaactggtccgcgtaatatactttgctttgcaccttcaatcgtatgtgctgtaacagccccatctaacgtttgcggtacaccaagagcgacaaagattaacgccgtaataaaagcgataggaagaaatactctcgttaacgctctcgtaaaatcaacgaaaaagttaccgagttcttttccagcgagccctcttataaatgccataacgagcgctaatgttgttgctggtgctgcgaacattaaaaatgtaatcccgattaattgtgataaataagataagccattttcaccgctataatgctgtaagtttgtatcagccataaaactaattgctgtattaaaagcgagcgtaggctccattccttcaatatgcgctggatttagcggcaatacaccttgtaatctgaaaatgaaatatacaataacaatcataaatccgttgagtaaaactaatgataatgcgtactgtttccacgtttgattgtattcttttacacccgtaattttaaaaataattttttcaaaaggcccgaatactttatctagctttttgctaccttgaaaagctttttctaaataaatccccgttggctttgctactaaaataaacaagagcattgtaataatgactgcaacccaaatcataatgaatgattccccctaattaaaacttctctggatttaataatgcatacactaaatacactgtaattgctgcgacaataaccgataagacaatcatcatgattgctttccttctttcacaactttatctgaccaacttgcaagacttgccattgatgcaactaataaaataaaaatcccgaccattacaacatctaacatagctatccctcgctttgtttttgttaaaatttaccatttaaatgttaaaaaagaacactgagctctactcagtgttcaaaaaatgaacaacaaaaagtaaacctcctctctaaacgcttacgaggttagctgtcggattcgggcctaaagagtagccctactttcaaaactgaaagattcaccccaagtgacgatgcacaaaattggttcccccgctccatttctggaactcagcgattttaggtttttttggaaattttatgaatgatttatgagagtaaatatactcctctatatttcacttgtaaaggggtaaattactgaaaataataatatttacatccatttaaacgcttacattaaaggttattactattatttcatctattttctttatttctcttctcttttcttaaaaatgaccttttaaatatgaaataaaaagagcgaatgagatgaagtgcatagcttgttgcactcagcattcgctctttttattcaacctttattctcctcgtaaaaatgcacgtaaatttctcccgcgaatataaacttgtgtcaattctgcatgtagctgctcatactcggtaatatccacctctaaatacaaagcatcttttgatggtaatataatatacggccctggaaaaaggggatcgatctgaaccaattcttgaactcgctctaccgatactgcccaacgatttgctatatctccaagtaatagtaccttcatcatttcttcccccgccctattcaaaaaataaaaaagaaatattatcacaatttgtaaacacgacaaacttagctccaattgtttcatagagcctcgctggatatcgtttattccttgtaacaatagtaataggtgcttgaaaagaaaagcgaatgtgttctgtgaaaaaactaacgattgaaagctcatcccctagtaaaatcaccttcttaatacactcacaaatactagtaaagtcctgctccttactgcagctataagtccaatcaaacccacaattcctaacttcagccgctatctcttcatttgctgtaaaaataattaactcatgttgaaatgatactagatctcttaaactatctaccttactttcttctccaacacaaataagtgttagttccatgtacctcatcctccttagtataaaagaaatcaaacatagattgatattctcctatactaatcagatcgatgaagtgatgtatccatcatggcaccgtcctctctcaagacgcttacgaagttagctgtcggattcggactttgagagtagccctactttcaaacttgaaagattcacccctagtgcctacgcacaaattggttcctccgctccatataattggactcagcgtttacaaaaaaatgtattctggctgatatattactcctgtattttgaaaaagtaaacagaaaaaaagccagttataaaactggcttttcacttacctatgcacgcattctattcactttatatgcaaaatgattcgtcggcccatggccactaccaatattcaatggctcttcaattgctatactaataaatcgttttgcttcttgaacagcatcttcaatcgagtatcctttcgcaagtcctgctgtaaccgctgaagcaaatgtacacccacttccatgcgtttgctttgaaggaattcgctcgcttctaaactcaataaatttttctccatcaaagaggaaatcaattacttcattcccttgatattctgcatgtccgcccttcataagcacatatttagcacctaattcatacaatacttttgcagcttccttactatcttcaacattatgaatctccatcccagttaacacttctgcttctgggacattcggtgttataacagttgctactggtaataaatattcttttaatgcttgaactgcttcttgctgtaataatgatgcaccgccttttgcaatcataacgggatctagcacaatattattccagccaaactttttaatttgttctgcaacaatttgaattatttcactactaaataacattcctagcttcactgcatctggtgttaaatccgtaccaattgaattcaactgttctgtaataccttctaacggaacaggatataccccttgaacgccaagcgtgttttgagcagtaatcgccgtaatagccgtcattccgtatacaccaagctcttggaatgtttttaaatctgcctgaattccagcaccgccgccgctatcagaccctgcaattgttaaagctttattcactttcatcccactcatccttttctatccaaaatagcgatgataaatcgtttttgcttcgcttatatctttcgttccatgtacgagcacacggccatctttaaaggcgactaacctcttgtcttcaatagaaaatgatagtaaatatggatttatatttaaatcattcacacgaccttccaacaactctttatattgttcaaaatttatttcatctttatgaggtggtctaatttgaactgtatttcgcccgcataaaactgctgtttttgatgtgttctctttatttaaatacggatataatgcattctctccgcatgaaggacaattatgctggcgaagcttttgcacattcatacatgaatactcattcttccacatatcaaacgatacaagcccatctcgaagtgattcgtaatcttctactaacagtttaagagcttctgttacttgatgagaaacgacaagagatacagcaggtgatataatacccgctgtatcacatgttgccccgccaagcggaatcgactgtaataaacatgataaacatggtgttttactaggaaggattgtgtaagaaagaccgtaactacctacacatgcaccgtaaatccatggaatagaatatttttgtgctatatcatttacaataaagcgtgtttcaaaattatcagtcgcatcaataattacatcaacatttataacaagttcttctagctcttcagctgttacatcttgaacgagagcttctattgttacatcgctattaatctcatctaaacgttttttagccgctatagcttttggaagattattctttacgtcgctctctgcatacaattgttgtctttgtaaattactccaatctacataatcacggtcaacaattgttatcttgccaacacctgctcttacaaacatctctgcatttgcactacctaatgcacctgcaccgataataagcacatgcttttctcttatcttttgctgtccttcttctccaattggagaaaatagttcttggcgagaatatcgattattcaactacgctcattccttctaaaggactacttgcagttgcacaacgcttacgtgcaatacgacctgcttcaaatcctaaacggcctgcttcaatacttaatttcattgcttgtgccattttaataggatcttttgcacctgatacagctgtatttaataacacgccatctgctcctaattccattgcaaatgccgcatcagctgggctaccaataccggcatcaacgataactggtactgtcgcttgttcaataatgaagctcaaatttaatggatttacaataccaagtcctgatccgattggagatgctcctggcataatcgcatgcacgccaagctcttgtaatttacgtgctaatacaacatcatcagatgtatacggaagtacgataaatccttcttccagtaacatttcagatgcctttaacgtttctaccggatcaggtaataacgttctatcatcaccaataacttctacctttatcatgtcacaaagcccagaggcttttgctaattttgcaatacgaacagcctcttcagcgttttttgcccctgctgtatttggtaataacgtatattttttcacatcaagtttctctaataaattaggttgctttgcatcaaagatatccatacgacgtactgcaaacgttaaaatttcagcttcagaaacgtcaattgccttttgctgtacgtcaaaatcagggaatttacctgttcctaataaaagtctagaatgaaatgaaaatggtccaatgtttaacataatcaaccgcctcctacgaaagttacaatctcaatttggtctccatcaaaaacagatgtatctgtatgatcatctttttgtaaaatatctttattacgctctactacaacaattctgttatctaactctaaatgtgtaagtagctcagctactgtttttacactcgctggcacttcaatttggttaccattaatttttaaattcaaacttccatcccctttctaaacgcttctagaaagcaatgaatctagcaaatgattctcttgctttccttctattaaatcagccatatattgaccagaaataggacttaataaaataccgtttcgataatggcccgtgcaagcatataaaccttttatttcttcatgctctcccatataaggagcttcatgattcgattgtggtcgtaatcctgcccacgtgctttcccattctgcttcttttaaagctggcaatattgtataagcacgctctaatatagaagttatactttctggctgcacagttttattgaacgtatgtggcttcattgttgccccaattacgtaacgtccaccgcgctttggagtaatgtaaaatctttcttgaaaaataggtgcttttaaaagtttttttctacttcttaccgcaaccacttctcctttaactggatatgtaccccaatcacggtgaaaataacctagtaacttcgtgctccatgaacctcctgcaataacgactttctcacatgtgacaataccttcacttgtaataactccagtcactttattattttcaatacggatatcaaatacttctgtctgttcatatatatcagcaccggaaattgccgcagaatgtgcgaatgctttcgtaagctctggtgcaataacatgaccgtctttcggataatatactgctcctataatagattcggatagatatggctctttttcccgcacatggtctcccgttagaaaataagaatcttcacctgttttctgctgccaatccataatgtgaagtattctttccttctcatcttcattttgagcaatacgataaattcctttttcttcatatccaatatcaatacccgtcttttcacgtaaaactgctgcaagttgtggaaatatagctcggctttctctagcaagttcaaatagcggatcatacgcatcccattctgcctgaacaccaagtaaaccagcagctgctttggaagcttccgatgcaatactttgcttctccacaatcgctactttatgtcctctttctgctagaaaatgtgcaactgaactgccaattacaccaccaccaataatcgctacatcatacttctcacacatgtttttccgcccactttcttattgattccttataagatttcgctttgctatacgggttactactacttacaattccagacataactgctataccacttacaccgttagtaagaacatccactgtgttttgtggggtaattcctccaattgctgtaatcggtatagataaacaccttgcaatgtctgaaatttcttcaagccctctcgctggcacaccttttttacaatctgtcggaaatacatggccataaacgagtgaatccgctccatttttaaaagctactattgcttcatctagcgaatgcacagaataaccgacatgcaaatacgaaaacttttctttcactgactttacatctgtacttcgatatcctagttgaacacgaggaatatttaataaaattgcaatatcaattcgatcgtttatgacaattttagaagccggaaagccctccattaatagactttccacaccttcatataattccttcgtactcttctcacgctcacgaatatgcaaataatcaatctcactctcaatttgcatcgctacattcactaactcttcgaatggcatatggccatttgagattacgtggagctcatttttcatattcattcgcctactttaaaatattttcgaatagttcatcggctgggacggtttctttcgtcattcctttgtccttcagccacttattttgtttctcccaagattcttttgaatctgataaaaatggctcatctttcgtttccatcttctctaataaaattttcatactttccttttcaacttctggcacaagtgggaagttttctttttcttgatgatttaataaaatattcaatgcttcatctgggtttttcttcatgaaatcatagccttttttcgtaccgcgtaagaaagcttgcaacgcttctttatcttttttcaacgttttatcacctgttacaaacacaagctcatgatagtttggtactccgtaatcagctggattaaagtacgctggttcatggccttcatgacgcataacaggtacttcatggttaatgtatgcccctgttaccgcatctactttcttcgtaattaatgctggtactaaatcaaagccaacatcaactactttcactgtatcaggattaccaccagcttcttttaccatcgtttttaaatacatctcacttaaaggtgttccagagtatcctactgtttttccttctaaatctttcggtgattgaatgcccgctgatttcagtgatacaacatgatttaatggtgaacgtacgacagctccaattgatttcactggaatttgctcattcgctctcgccataacaacatctggctgataatacaagccaactgttaccttccctgctgctgccagcgttaatggatcagtcggattagaagggaatttaatatttacctttacaccttcttctttaaagtatcctttttcaattgctgcatagataaagctatgtaccgcatttggataccaatctaacatgactgttatttctttctcttttttacttttgtctgatgctgaattactcgaacatcctgcaattattgcaattaataatgtaaacacaaagatgcgctttaaaaatttcatgaatacttcctccaactaatgaatttcttttctaatatggaaataattacgacgaagaaaatagctaataatgataacaatacaataggtgcaaatacgccagctccatctaactgcgtcatcattctcttactgaaatatccaagcccagcttgtgcaccgagccattctccaattgctgctccgataacactaagcggaactgcaatttttaaagctgagaaaaaataaggaagagcagacggcaactttaatttaagaaaaatatctctttttgttgctccatatgtaactaagagctcctcccattcttttttcgtactacgcagtccatcatacgtattgaccgcaattgggaaacacgtaattaaaactgtgacaacaaccttactccaaattgtgtatccaaaccataaaacaaatagcggagcaagcgcagtaatcggaatcgtttgtgaagcaactaataatggataaaatgctctctccatccatgtactcgcattcattaacatcgctagcccaacacctaatacgatagagataacaacacctattaaaacgacgtataacgttgcaggtaaatgaactgtaaataatatgtcttttagtttccatatcttcattacaatcgcagaaggtgacggtaaaatgtacatctcatctacaattcttgctcctatttcccacacagctagtaaaatactagaaagtgtaatagcaggaactaattctttcaatcggttcatcacacaagtacctgcctttgtaacatactaagaagctcatctttcagcgctaatacttccggtttatataaatcttttcgtgttctgttatgatcaagcggtacagtccgctcagtcaaagtcgttatcggctgctgttccactactaaaactcggtttgaaagaaataacgcttcttcaacatcatgagtaatgaataaaattgttttttcccactcttgccattgttcaaacaaccattcttgcaaagaggtcttcgttaaagcatccaacgcactaaatggttcatctaacagcaatatttccccgcctgttaataaagttcgaataaaagatacacgttgtctcataccaccagataaatctttcggatattttttctcatacccttgcaaaccaaatttatgtaacagttcctttgcctttacttgtgcttctttcttctgtacaccttggcactctagcggcagggcagcattctcaataattgttctccacggcaaaagcatatctttttgcggcatatatcctacaggatggtgctttgtttctgtcagttctatctgtccagtacttaccttttctagacctgtaataaggcgaaataaagtacttttcccacatccactcggtccgataatactgacaaactctttctcatgtatagaagcatttaattcatggatgattggtttctcatcgtaatgaaaagaaacattatgaaactgtagtatgttcttgctcctcaaatccccacatctccttacgataggacatatcccagaataaatattcaaatcgactggaatataagaaaatctcctctaatctttctagttctgtctcagactttcccactgccatttcatttaataaatctattaaccaaatacacagattaccgtattcttccgaactatatccttgaatccactcaccaaaaaactcatgatctcttgctccaggaatatcatttaaacgctttccaatttcccaatagctccacatacatggaagaagcgctgctattaattccgcaagtgtgccattttgagatacagacatcatgtaatttgtataagctaaatttttagcagatggtttcgcagactctatctcctctatagaaattccaagtctttttgcatattgtttatggattgtcatttcgccatttaatattccatcaatttgttcagcgaactttcccattacttgtggattcgttgcttttacaacaccaatcgcatataactttgcataatctagcagatataaataatcttgaataatataatactggaatttatctttttctaacgtgccatctcccatacctactacaaacggatgattatgactcatctcccaaaccggttgcacagtttctaataatctatcgcaaaatttcatttctctatcccctttcaatatatgtatctaaataaaaaaccacttctatatataagaagtggttacagcaaataaagttatacatttattcgatgttccacttcccttcgctagtattacctagatcaggtgttgtaagggttaaggattattcctctctcagcaaatcaagcacccctagtggtttcaatatgaaattttcaaataaaaaagccccgtttctatacgcaaagaaacggggactcattgttagtgtccgaattgcttccctacgctagcataatctagatcaggtaataaaaaggatcaaaggcttacggcctactctcagctggcaacaccagctctcctagcaaactataaaattatcactgtcagtataacaccctaataagacatcatcaacttttttaattttcttaattattaacagaatatcaaatttatacaatacatacattctattttagaaaataaaaccccaattaattgcataagaaggaatcattatcctcaaaaaatttatttttatattgatttcatattacatttatgtgaatacacccactatattatatctttatactataataaaattacaactatacaactagaggaggtctctattccatgaatatgaaagctactgctttaacagcaactactgtagcgattgcttctttacttccttctatgggtgaaacaaatgtacaaaaagcaaacgctgaacaattatctaatattaaaactgggtatgtcaaagtcgatcaagtagcattacatacagaagataacgtaaaaagcacatcaattgatacaattcgctttaatacaaaagtgaacatccttgaaacaactaatgagtggtataaagtatctgttcataataaagtaggttatgtacaaaaagatgctattttactaaaaaacaaacttcattctaatgatcaatacatcgttaatgctaatgcattaaacgttcgctctgaacctaatttagaatcttccattttagatgtattaccaaatggcaagtttattaccgttcaagaagatcaaggcgaatggtataaaatatcgcataatggccaaacaggttacgtacaaaaagcattcatctctaatggttcacaacccttagtaaaaggaatcaccgttcaaaataatacaaaatatactgttgcaacacctaatctaaatgtacgtagcaacgctagtacaagtagcgctctactcggttcattacaaaacggtacacaagtacaagtagtagaaactgtaggaacttggtataaaattcgttttggcacaggatacggatatgtagcaaaacactatgtagtacaaaatcaaccacaagctaaaactgatcaaccttcatcaattccagctgctttcaaattccctgctcaaggaagaattagctcaacctttgatatacgctgggaacaaatgcattatggtatagatattgccgctccaggaaacgtctctatccaagctgctgctgcaggtaaagttgtgaaatcttattattcagctagctatggcaatgttgttttcattgcgcatcaaatcaatgggaaattatatacaactgtttatgctcatatgaaggatcgcactgtacaagctggtgatcaagtacaaactggacaattaataggtcatatgggaaacacaggtcattcatacgggcagcatcttcattttgaattacataatggagaatggaattttgaaaaaacaaatgcagtaaatccactgccatatttagttaggtaaattgtatgccacgcaatatacctcttataattgaatacgtagcctttttaggtttaatctgttgtttaatcatttacaatacaaacattgtatttttatctattattattgcttttgttgcattagaaattatgatggaatcatttcaagtgcaactaaaacaaaaaattgcccatatttataatgctatttttcttttgagtgctctcataacaaatataattagtaatggcttttatttatctactgtatttccagtattctttatggctgttttattatttgtagctagatatattaatgtcccttataaccaaaaacaaaaacaagaacaagaagcttagaaagaggagacactgtgtaccaatctttcaaagatactccaataaaatacatattgaatttgtataagaaagccaatactttttttgatatacaaggaagttatactgaacaacttctcctatatggaatgttttttcttgtcttaatcactttctctttgttttactaacaaaaaaggatctcacataaactggagatcctttttaatttatattaatttttcatatcgaaaatattgtttatccacaagcatatttttcataaataaagctcagattatattttttctctaagctcattcgttgttcgtcatcgcaccaatagaaaagaatatcatgaatcgttgcgtaacgcttatttttaagaaatagcctaaagaatgatggtaaacaatcatgtaattgtataaatatataattgcgtagtgtttcttctttatattcaatgcccttacaaatatacagtaattcttcacaataatatgcatgctgtggaacttgtatcatttcgaaaaatggcacataagatagtagctttccaataaaatgaccgtatcgatccattactcctatcgtcatatgctccatcatttctttcatcacatataaataatcatctacatgcgttgtctttaatgggtctaaacgatcggaaatttgagataatacagctctttgacatgctaaaactgcctgactaggtccataatatgataggaaatctgtacacttacgatatttccgtaataaatcatgtgtatacaaatcatatacaaaagtattacaatacattgctaaactcatcatatcactatttaattgctcttttgataatgatttcgctctcttgcacatataaaagaatgtaaattccaatacttctttatgagataataaatgtttacaatcggttatacacttctcattaaatttaactctatcccaaatttcaatatccctatctgtcaattcacctatacgatatttaataattaaataatttaaagcaactgattgcgtcaaaagatcccatgtttcatattccaatgaagtatgaacaaactcagctaatccttgcgctatcataaaatcatttgcctcttcataccaaccaatctcttggcataagcgaagaatacgcactaaagttggaatttcatctttatgaaactgcggtaatttctttgctttattcatgccatatacgataaatgccgctaaattttcttctttataaaattctttctctttccatactaatatagttcgttctttcccctcaccttttgggtgacaaggtacaagcaaagaaaataattcagcgaaattatttggttctatatatgtatctgtaaccaaattccaatttggatcgccctgtacagccttcatataattccccttcccttttcatctatgtaggaaatattaatttattatcgcaccactaaaaattaatattgttatattcaaaatctatcataatacttatatctatcagtatatcatcttttctcttattaaaaattaagaataacaaattttaaaaaaatgtcgaaattattaaccgtatccttattatataatgtctcagatacatcacgctaacatattagtttaatccatatatgctagaataatgtatctgaaatttatatataatttagctctttatgagtgaccattaaactctcggttaattaaagtttcaatttactctgtacgctctgagatttcactcaaggcaaatccagcttgatcatctgctgattcccttatagctaaatctcctagtgctaacatgccaataagttgaccactatcaactactggtaatcgtctaatttgatgctgtgccattagctctgtagctttttcaatagaatcatttggagaaactgagataatatttgttgtcattacatttgtaattttattagatccaggatgtttttcagcaatccctcgaacgactaaatcacgatcagtaacaagcccaacaacttgctcattttcaacaacaggaattaatccaactgattcttccttcattttaacagctgcctcatatacattgtctagcggtgtacaatgtacaatatgggtactcattaagtctctaactcgtgtcattatttatttcctcctttttatacataccatagcttttccaaaattcctttatttatttctggaaagtaacgtaataaaaaggattaacaaaataaaaaagagccagcataatgctgactcttttttgtatgacccgtacgggattcgaacccgtgttaccgccgtgaaagggcggtgtcttaaccacttgaccaacgggccatggctccgcaggtaggactcgaacctacgaccgatcggttaacagccgatagctctaccactgagctactgcggaataatatatggtgggcctaaatggactcgaaccatcgacctcacgcttatcaggcgtgcgctctaaccagctgagctataggcccatatactttacaggggcagtaggaatcgaacccacactggaggttttggagacctcagttctacctttaaactatgcccctaaatgatgccggctagaggacttgaacccccaacctactgattacaagtcagttgctctaccaattgagctaagccggcataaaaaaaatggtggctcgggacggaatcgaaccgccgacacgaggattttcagtcctctgctctaccgactgagctaccgagccttttggtaagaaagataattgtttagtcatgtaagaccactcctttttatttttaaattacttttgtcttattgctccacgtcttcgttcatagcaaggtctatgcatccccattaaatcctcaatttcacgagtacttaatttctcttttcgttttttcttctttttcttctttgcttgattcgattgctttttccattcacgtagctgatcctttaacaccttcatttccccatctcccttttcaaaataaaaaggacacctattcctaaaacagctttaattgctgctttaatgaattggtgtcctctagttttctagccggacaatattgatttttaatttactttaaaagacttgcttttgagttttctttccaactctcacctttgtgcaaatgaatattccatgcttgtggtggtgtaaaacctatatcttgcagatcttttatattttgcggttcttcaaaagtgcacggcacacttatttctttagtaaagtcaaaatcataattacctgtttcaccaggagaagtatccgcccaatcaacaccaccctttatttccacgctttctccatcgggtgtttctaaatagaatttcacaccttctacactcattcccattttcccaacctcactttctattcaaaggattattttgtttggttttaacttctacattcccttaataatttataattttgtataacaacgttttgaaatttattgttcatttctatgtgatcttttgctttttttaacatgcgcccatttatccttctattaaactttaaaattatgctcccatttccgtttcctttataacttccaaaagtataagaaaccatatactcaaaatatcttgctctcatttccctctacctccatatttttctcaatatatcctaacaacatatcttccaattccattacacatgaattaaattgttctgggtcatcactattcatagttttcacccatttaattatttctttttttaatatttgttctttactcatttcttcttcctcccttgaataaaactcaatattccgtcaatactgtagacaacccattaagttactttctccttgttcccccttggagaaccagccgaacagttagcttttgctagctgctctttttaatggttcaaaatctctaaagaaaacatcttctgataccggtttgatgtaaccgtcgggaaatttagcccaacagtaccaatcattcggattaacctccattaaatgaacaaccgtgccatttttatgcttgtatggttctggtggatctatgaccatatccattctccttttctacaaaatgaaatttttattaattatttctcaacaattaacacatagaaatcccaatccgtttttagtaatatatagttaatctctatatgcttagctttgttaaaaggacccacccccttaatgtgggtccttctttttaaatattttatactaaaatagcgtttttgttcaaattctttcttcttttaactcatactgcaattgctgattctcttcccgtaataatgtaatttcttcaaccagacgtggcactgaatgaaaaacatttaaaatgttatctaagttttctaaaacgaaatcttcatcatcgtatttatccattaaatcgttgtacatttctattgtgagtctaagatcattcagttcttgcaacttttgtaaatccatccctcattcttcctttcaaataacgattttgtattaaatcacgaactatcactggatccagtagtgctttttgttcgtttttcaaatagagattttgtattatttttgtgcgctcattgctttttcttctttaacacgtttcttattacaccaatagcaaagatttgggcctttatgactcattgatggtctatataaagttttaactggcttgctacatttcggacattcttgtttatcatatttcacgatttcgttcccctctcaaataaagattttgtattacttaatgagtcacatcactaatctcagcagttatccaatccgtatcaacatcttcaattggtggcatttctcccaaacgatcaaatgctatctttttattttttttaagtaattcatctaaattactttgtcttttaaggattcgctttaaaccttcacctgctttttctaaaaacctcattgtatcttccttagtacttgttgccatccaaatcctaaaatcaatcggaatgctcatagcatgtacaccagatgttacttctgaaatattaatagatttacttaatggaatagcacaaaaacgatattttcccactttaatttcatgaccaactgcaggtacccattcatcaaatgctagataaaaacgttgagcttgctcattcacttttatttccattccgtttccctccaaaataagaattttgtttagttttctaatttgctaatccgacaataacgcatggtgtatcaccaaattctttctctttatataattcttctaatgtttgatatactggaaatccgacacaagaaacttcaattttttcatctggatgcattgtttctaacaccacgtcatccatatatccgcatccattatgacaatgcattaaataatatcctgcagcttcatatttgctattggccaggataacttttatatcctgatctccgccaaaagacattttataaaattccatatcttattctcctttttcttgtgccttttcaattaaccaataaattgtatctacttctaacatcactaaagggttactagtaaatgcattttcaacagcttcgtcacatttagccttaattgattctattgaaggttccatattttctccctttctattcaaataactattttgtttagttttctaacaagctaatacgctgcaaatacttaactgagaagtaaccactaaatccttctaaaaacaccacttgcgaaccactatttgctttaaattgatctgttctacaagtccaaacttttccctcataacgcttcgcttctaagcaagtgtgcatcactaccttgtcacctgcttttaattcttccattgcaccgaatactgtttgataagcttctttatattttcgttttataaattctacttgcttcaacgttctaacgtttgcaaagcgacctttcatatagtccaagcaaacatgatctatatcttctggaggaccagggaagtaagtggaagattgcttccctccactcgttgtataagtcatctcaaccccaccatgttcattctttatcatttcaaatgtaggtttcatttccgttccccttttcgatcctttttaataaaaattagttgaaacaactactgtaggttctacactcactggtatcaactttcggtagtatctttccccatcgatctcaattcccgtttttcttgcacccttatataaagaacttaaacgtttaaaatcactttcagaaattagtttccatacaaatatgtcattcattgattcttcaatattcctagtatcataacgctcccattcccaaaactttttagataaccattcatctaaatcagtatgactcgtgaatgcatatgcttcatccccacaatcatcttctctaaagacaaagtaatactccgttaaataatcttggtgtttactttccagtaattctttaaatgctctccaattgcttttaagtccgcctaagtctaacgcttccacctctaattcctcccctttgttttttattcaaataacgcttttgttataaaactaatccatcattatgctttccactttgttcatggtggcttgcatatcttgatacgcacctaatatatctttagtcttataattacgtttacctaaatttatgtgtacttcccatctaatcacactgaatctatcttcgctttttcgttgcttttctaaacgaataaccgcacgtctacgtaccattttcactacgattcctcatttcttaacaaaattcaaatttggtcttactttaatagatctgaatccacacttttccctctgtgttgatttaagatagtctctaatgcaattgctgttccctcattcgcaatccattgaccacgatagtaacctgataaacctaaatctccaacttcatacgctttgtctgattcctttctgttttccatcgctgattgttgcaattgatttatatattccttgattacttccttcattatctccagctccttttctaattccttcagtttctcacaatcgatttctcgaatcgtactgaggcattttttccagttctaattactggtgttgttacagccttttctatatcccattttctagtgattactcttgtcataaacgtgctatagccaattccattgggcttagctcgttctaaccacacttttcccaaaccttttctttttatagctggtttcgtagaggcctcttgatatccccaaccgctatttaatctactgtaaaatgtagctgcgtttatcccattcgcctcagcgattctacgccatttcgtgtgcactccctcaaacttgttatgtcttacgcttcctggcggtgctgttaatgcttcttctaaatcccaatccgcttcataaacacgataatgtaacgttttcctactaattccattagataaagcccttgcatattcttcatcggttaaccatcgatttaaagccgccaccattctccctcctaatcgagtgccaaaaattctgtcctagtacgatttgaatgagttatcctaatcttctgaatacacttgccgtgctcttctaacgctgcattccaagcttccacttcagttttagcatcaaaacaatccattttttgtcgttcttctttatcgtaaaaatgcacttcaaaacttggatttaaaaacttttcactggtgcttatggcgttgtagcaaaaactccctattacatcatcaatcgataattgcttcataatcgcatctccagttatttgattttttccgtatacgtagttgatacgcgatcaaccttcccactttgccacgtaatgatttgttcaccaaatcctgttgctggaggattcagcggagtaacttcaccatttttgaccacgtaaattttattatcattaacatcgatttcaactttcgtaggcttcatacgactgaaatccccctttttcttgttagctaactttttgttgctgattaagttgtaaatcttgcttcattgcctcaaatttaattaagtacgctttccaacgcttatcattttcttcttgttgttgctttgctacttcacagttacaaccttccgttagagttacacctgaataaatttctttacgaataattcctttatcacgacataatacacacatgattattcctccttcttagaaacctaaatttgcaagtctttgatccgctgtggtgaatttcaaaacctttgaatcacctaataagcgactaacggttttagcatcatatttattaaaaagttgttttccagtaaagtttgtagtggtaaaggtactcattccttgtctagcatttgataccgcatataaaagacgttggatgaaatctgaagcttgtctatttgaatctgtcgaaccactttccgccccaagatcatccaacactacaaaatcagcttggccaattaattgaacaaaatattgaagtgtatatttactgctcttatcatcgaaagaatccataatcatccttgttattgcttctaattccacatataaacaacttttcataagatgatagttttcttctccctgactgatatcccagaaatattgatttaattcatgaagcatgctgtatgctaagaaactctttgccgtcccttgatttcctgtaaatacaacttttctaatttctccgttctttaaatcctccaaagtttcttctatagctttcttgtgactaatcgtttcatcacacccggttctgtaatcagataatcttgaaagaggaattttcttatttgtaataacactagccttttccagcatgttaaatttttgcaaacggttaatttttttatagtgagcattagcctgttcttctaaaactttgttgttttgttcaactacgcatctagggcaaacaacttgtcctctgtattcaatcatttgaactggcttaatgattttttgtccacctatttcataagagtgattcatacattgatcagaatggtaattcaccttcaattccagggattctgccagctttttcattggtgttgccatttcgtttcgctccttttttacctttgtttttaaactctatttctgctgcattaacatcagctaaagtacgaatatttttattaacccactgttttaaaatgccctcagcataattccatttcttctgctgtttcaaagcacgttccattgctgcttgtacaagttcttcgcttgtatcatttacccattgcgaaatactttcggctatgaatgaatttaaaataccgaaattattttcgtagaaagagaagatgctactactacttacattctctgtagtactctttgtagtaatctctgtatttgtctttactttgaagttaggagactccttacttgtaagtgaagagggtcttgatttagaagtaaccaccctatttacttctaagtaaccagggtcttcttttatctcttgatacatactagaaattttccttatttctgttggtacaggttccacaaacattacgttattcaaaattttcccatcagcgctaatagtcctaaactcgattttgacaagtagcatatcagttaataaatcacatgctcttttcacttgtaattttgtaaatccaaaagtatcggctaactgttgataatttttttgcaacttgtccgctttaaattttttcttgtaagttactttcccatctatttcatctcgaataactgtaggacgataccaataaacaatttcactcaataccataatcgctacaatgtgaggcttaccattactaaaagtgatgtaattaaaccattcatgatctaccacattacctttgaaatttaacccaccaatttcagttactacgtttgacataaatatttacctccttgtacaaaccgccacatatgcttgtccgcttttgataattctttgaatttcataatgtggataaccaacactgaaatactgttcaatcatttgcattaattcatcgttgctttttgctaagtcccaaaactcattaggtaatagcacttgatattcaattaaatccatgtactatttccctactttccgtggtatactaacatcaagtgtttttctaaagggacccattgccttgggtcttttccttttgttcaacatcactccatgcccatcgttttattggttcgtaagtaatgtaaagcaacaatgcactgcatgcgataaacattgcgaatactactaacgatgttgtatcttccactaaatcacttccccttctgaataaacttagcgtatgattagtcatcaatctcaactattacactttgaatctttgtttttaatgcaacttgttgtgtaagtataatagaagatgctggttcaccatcttctattaaccccttaatcatacgactcgcttcaatttttgattcacactcgtaagcgtttaaaccatatcctctgttatgaagtacaaaatatttagtttctttcattttcttttcctcctactgaacttccgccatatttatttgtgaatttacaaaagtaatttcttcacttaatacaattggtaatgtgtattcttcaacgatttttgatgctaactccaaatgaccacgtttaatcgctttatgacttgttactccaaactctctatacaactgtctatagatgtctttataaacttttgatctcaaaccacggtcttgataagcattagaattcttaccaccaagtaatacaacaccataacgttttactgcattggatatttcatcgcactctactgcgaataatggtgcgttttctcgtaagtctttgacatctgatttgatgtgctggagttcttgcttttgtccttctaacgcatcaaatgttagttttaaaatactcattgggtctgtagggatttgtttctgttctctcatattgaaatatccatctacaaactgatcgtataattcccatgctgtatcatcttcaaggatttttaaaagctttgcgtatcctcgttcggagaggaggtagatgttcttcgattgattaaatgattgttttgtatatccagccaatcgacctaatggctcaaacccattagccctaatatcaataatatctacagtatctttaaaacgatttcggttatcattaatacgacgatttacttctccaatttgttgcccatgaatttcagcaatttcttttactaacattgctttcttactttcaccgaatccaccctcgattccagtgaattgataacccgcaatgttttgtttacctaaaatatgtagttcatttgctaccgttaatttatccatgttattttcctcctatttatgcatttggaattacttttgttgtatttgtatcacgatgtactaaatgcatttcattacttaactttttgaagattaaccaattatcagaatttaaattgtgtgactcaatatggatcttttccttcttggttggctttttaccgtttttcattatattcacctcctctgtatctacaacatcaagattaatttcacttaacccgcttaccgtaattcatgattatttttaggtatttttgttctttcgtgaaaatactctattggaactcgtccggctaccgtgatataacctttttcttttagttcattgttaagctgtttaataatttctcgcgctttcgtctctttcacactaaacaaatccatgacatgttcacatctatagacatccatcaaccacacctcattaagcaacaccattagttacgaaacgcaacattcgaggaaaaaaaattcgtataacctcattcggttctatttttaattcattcacaattttatttacttcttctgtatcaaacacagagtaaccgttaatcttatcattcaaggtagttgtacttatctctaatgcctcagccaatttcctataactagaattttcttctcttatttttccttttaaagcttttaattctggatatttacgtcttttgttcatataatcacccctctctcttctaataaattgcagttattgttacgtttcgtaacacatccctagaatacccttaaaaaaaacaactgtcaatacgtttcgtaacatttttgtcaatttcacctctgttgttgttgcgttttgtaacaaacttgtttatactaatcgaaaaagggggttgttacaaaatggaacaaaagcaacttttaaataaagaaatattccctatcagattgaaagaaatcatgcttgagaataaccaaacaatttatactctttcggaaagaattaatctttctgcagccaccgtatcccgatattgtagtggtaaaatggcaccaaaactaactactatagaagttatagcaaaacaatttggtataaaccctgcttggttaatggggtacgatgtagataaacttatcgaaaaaaaacaaccagatcggaaatactatcaaataactgaaaaagacaaaaaagacattgctaaacaattagaaaaaatgttagatggattgggtgatgacaaaaatggttttgccgctttcgatggcgaaccacttgacgaagccacaaagatggtattaaaagattcacttgaacgttcgatgcttttagcacgagaaatagctaagaaaaaattcactcctaagaaatatagaaattaagggggactttgggttgaaggataacataaaacaacacgcactagatctagtaaaagaacacggcacaaacaatccatttaaaatagctaaagaaagaaacatcgaattaatatttgaagacctgcaacatatctacggatattatctttactgtcggcgcgttcaaattattcatatcaattgcactctagaagaattttaccaactctatgtctgtgctcatgaattaggtcatgctgttagacacactgaagaagataccgcttttcttaataagcagacactcttttccacagataaattagaagtagaagcaaatacttttgctgttgaattattgatgcctgatgatgaagtttatcattatctccgttctggatacaccatagaacaaattgcaagtgtttatggagttcctaaacggttcatgaaatataaaacatttaatttttgaacttatttggaaggagttgagaaaggttgcctatctataaagacaaagaaagaggaacgtactatgtaaaaatcgtttaccgcgactacgaaggaaacaagaagcagaaaaaaaaacgtggtttcaaaaaaaagaacgatgctgtcgcctgggaaaaagaattccataaaaaacataatgaaagtagcgatatgagtttcgctagtctagttgaattatacatggaagatatagttcatcgcattagaccaaatactttcgaaaataaaaaatatattattaattcaagaatactaccattcttttcaaaaatcgccataaatgagatcaaacctatgcatatacgtaaatggcaaaacaccctaatttctcaagggtttagccaaacatatctaaaaacaattaataaccaattaaatgcgatactcaatttcgctgtaaaattttacggattatctgccaatccttcaaaagtagtcggctctataggaaaaaagcaagctgattctatgaatttttggacgttagaggaattcaatttattctacgaacaattagaaaaaaaagaaagtaaagttatattctctatacttttttggacaggaattcgttccggggagttattagggttgcaatggaaagacatagacttattaagcaacacaatttccattacaaaatcacttcaaaaggtgaatggcgaaactgtcataaatcctcccaaaacaccaaaaagcaaaagaattattcatatccctttggcactaagtgcattgattgtaaaatataaaaacaaattatacaaacctaaacataatgattttttatttgattgttctaagtactatgtgttatatgaattaagaagaggaataaaaaaagcaaatataaaaaagatacgtgtgcacgatcttagacattcacacgcatctcttctaatcgaattaggatatagcccattattgatatcggaaagattaggccatgaaaaaatcgagacgacactgcaagtttattcacatctgtatccaaacaagcatgatgctgtcgcaaagaagctaaataacttaatggaacaaaaaagttccatatgagtaccacacttctaaaaatatcgtttaaaaacgtggtacttcaacgttcacagctatttattcatttattcccactcaatagttgctggtggcttactcgttacatcatacacgatacggttaacgtgttttacttcgtttacgatacgtacagagattttctctaatacgtcccaagggatacgtgcccagtcagctgtcataccgtcgatagatgttactgcacggatacctactgtgtaatcgtaagtacgctcgtcacccataacacctacgctacgcataccaggaagtgcagtgaagtattgccagatttcacggtctaagcccgctttaataatttcttcacgtaaaatcgcatcagattcacgaacgatttctaatttctcttctgtaatttcacctaatacacgaataccaagacccggtcctgggaatggttgacgccatacgatttcatcaggaattcctagttcagatcctaatacacgtacttcgtctttaaataacgtgtttaaaggctcaattaatttgaactgcatgtcttctggaagtccaccaacgttgtggtgagatttaattgtttgtgcagttgctgtaccactttcaacgatgtctgtgtaaagtgtaccttgtgctaaaaagtccataccttgtaatttagacgcttcatcatcaaatacgtaaatgaattcgttaccgatgattttacgtttttgttctggatcttctacaccttttaacttgttcatgaagcgttcttttgcatccactttaataacgttcatgtggaagccttcgctaaatgttttcataacgccttctgcttcgcctttacgcagtaagccgtggtcaacgaaaatacaagttaattgatcgccgattgctttatgaattaatactgctacaacagaagagtctacaccgccactaagtgcgcatagtacttttttgtctccaacagtttcacgaattttttctaattctacttcgataaagttctccatgttccatccttcagaacaaccacatacgccgaatacgaagtttttaattaaatcgttaccgtgctcagagtgacgtacttctgggtggaattgtacaccgtataagtttttcgcttcattgctcataccagcaattgggcaagactcacttgttgcgtctactacgaatccttcaggtaaaccagttactaagtcaccatggctcatccatacaacttgctcttctggaaggttcgcatataattttgattcgttctctactttaagaacagcctttccgtactcacggtgatttgcacgctctactttaccaccgaagtgttgcgtcataagctgcataccgtaacaaataccgaagattggtaaacctagttcaaagattttttcatcacaatgtaatgcaccttcaccgtatacgctatttggtccaccagagaaaataatcccttttggattcattgctttaatttcttctgcagtaattgtatgtggatgaagttcactgtatacaccgaactcacgaattcgacgtgctattaactgattgtattgacttccaaaatctaaaacgataattgtatcgtgttgtttcttcaaaataatcaccccaacgttagttctcgtatataaatattttcaccaatttggcgaaaagcattaccaatataataaaaaaagccagtcctccgcctctagtctcataacaaagaaaaggcaggggtctggctttataaagaaagatagtctccgctctttataaatataagacacactgccttcatagtcaggttgtttgcggtaacccggtagagactctcaaaccatatcattgaggatatatgaaggatcgttttatattatcttcctagattctaacaatgaaatatcaatatggtcaagagagaaagcgacaaaattctacagaaattcatttccttttctaaaaaacataaaaaaacatccatttctatatagaaatggatgttttttagggcaaacggaattacatcattccgcccatgcatcagatatataaataagaagaaatacgactttttccaaacctgtaaaccctacgtttttttaaatttagaggataaaaaagaaaataaaaagtaaatgattatatatgtttcgtgaccgaaatgtgaccaaaaaataatatatgagagataccctccaaagattttccttcttcatttctcacgatacatttcgctcctaaaatttcacgagcgaaaattacttactagagacgatagttagtcaataaaaaagggtgggcgcaattttgcgctcatcccttcttcatatcattaacggttattttcttttagaaattttacgattttacttttaaaatcatgtagacaataaaagacttgtcgattgatttcctctagatcatcctttgttaaatattcattttcgtgtacttggtcaaacgtttcaacattaaataaagtattttctctaaagtcatctaaagccttatctaattctttttctaatctttcagttgacatattccattccccctatttaattacataagcatatataactaagtcttgtttattaccttcaaagtcatcaattcgagttattccataatcagtacctctaaaacgcactttcatagttggatcaatatcattacgccatctaattttaaaaatagcctctattttgtatttaattgcagccgctccaaaaaattcatctgctgaagcttgtcgataatatgcccaaatgttttcgccgctgggtaacggttcccattccggaattcgctgtcccatttcatcttctgtccatgttgccgttaaaagagttattttcttatcctttttttgagttgtagccataataattctccctcccctataaggctcttaaaaattcatcatgatgctcaaataaaccaacataagcatctaacatacttgctgttccatctattcgcatcttagcagcttgattttttactggtacaatgttgccgttacgatccgtttccacacctgtattagttaaacaccatttaagaataggtgaattattataattaatctttttcgcttgcaaatcggctcccatctgctgcataggaagacttaaagttttggctccttgaatgcatctaaccattttaaagccatgttgctccatttcttctacccaatacttagccgaataactgtcataataaacccacaaaggtgttattccgtaattgttgagcatttccacaaaccatgctgttatatcaccgtaatttatgctatttccgttacaaagacgtaatagcccttgctctagccatttatcatatggaatcttatccatttgaactcgtttttcaaaactatcacgtggcagccaatacatttgatgaataaaccgttttttggtgtctttatccacaaataaaagagttgcacaagataagtcagtagtaacacttaaatccgctccaccgatagcatagcaatttctaaactgctgtatatcaaatgtttcctcgttgtttatatcatcaaatgtaagccatgcgctctttattgtatccctaacattaaagtcctttgtaagtaagccgcttagatcgctagggttattctttgccttttccacttttctttctaaatcatctagttttttaattgatcccaaagctgggtttgcctttttccatgttgtagggtctgtccattcttcttttgaatctaattcgtaaagaatcggcaaaaagctatcatcttcaaatttaccgtctactacattacaagcatacgaatacatatcatcaaatatattctctctgactgtcccagccgttgtaatcataattaacataggttgttgtcgtgctgattgactttgcttcataacttcgtataaattacgatctaaaattgaatgtaattcatcaataataaccatgctgctattaagtccgtctaatgtattactatttttcgccaacggcataagtttagacatagtaagcggaaaatacagatcactttttcgtttcttaatatgcttggataaattaggactttgttgaatcatgctatgagtttcatcaaacaatatacgagcttgatctcgcttactagctatactgtaaacttccgcaccgccttctccatccgcaataagcatataagccgctattcctgctaacatcgttgtttttccattttttcgtgatacatagaataaactttctcgatatcgtcttaatcctgtatccttatccacaaaaccgaacaaagcagctatataagctttttgaaatagttctaactcaatcggcttacctgcccattctcccttactgtgcttgcaaaaacgctctataaattcaataggtttatttgccttgtcttcatcaaagacatatttgcttggttttgctatatcctcaactaatcgtttatattgcctataaactcgcttagaaaccattacttctccagattcaattgcattccaatacccttgtatataattcacgttatcacctcttaataaagtcaattagttcatcttcttttggttttaaatctgttggcggtaataaatcaactaattgcttatacaaaagactgtaacgctgtacagttgtgttataggcttttaacgctggatgttcccttaaaaattcttgcctaccttgtttaaacattgctgtcggtccttcttcatttacttgagtttttaaagcctctaaagtagtttgcataaatacaagctcgttatataaactctgcgctatcggtaaacgctctttaggaatctgccttaatatcgttttaagttttttcatatcactagaaatcgctgtaactttcttagaagtcctcatataatcaccttcattttttgtttttttccatccctccctttatatagaaagtcatggagaggaaaagaaaggctcctcctcggtcctcgagccatgcctttttcttaaattaatggggggtatgttttatttttgaatcaaattccctttgctatcgaatgctaatccatttgcgcatatctcgctgctatgatgttcttggttatggcacgtttggcataatgcctctaaattgtcccaactcaacgttatattgggattattaatattttgtggtgtaatatagcgtttatgatggcatataacggctatatcaccgcatctttcacataaatagtgcttactttgcatgaatccatctttacatttacgccatgttgcactgttataaaaagattttgcataatccttagccatttttcatattcctacctaatacagtcaatgccgctaatagattgtcgattgttcgctttaatcgttcactatcctgatcttgtgggtcataccacaactgtaagagaaactttgttactgtttgtgctaatggatgtactgatgtatcatctgtccatgttcttcctgttgttatctcgagataagacggaatagattctaataacggaatgatgattacgtcattgtcttcaccatctactcttactgtgtcccttgcttcctcgatactaattaacaatttactcactcctttaaataaaagggataccagcgctatactgataccccttcatacttagtttgcttatgcttgctttttagatagtttaataaatgcttctggtacaagtggtttcgtatctgcaattgccattgctcggtaatcaactaatccactcttaaagcttgattctcttgatgtttcaatcattacaccttgcggcatgttgtaacccatgtactggaagtttcctagaataatagtgtcgtcctcgatattgtcatcaataactacttctttacctagaatgtatccaatgctttcattctttggatccgcaataaagataggtcgtccgtttgcatccacaaggctatatacttcgttgtatagtgtagcgttactcatagcccattttgcccctgctgcatatcctcgcttaagcatagccaatgcttttgtaaagtctgtatacttccctgtattttcaaagctatttgtatcattccatgtaacacctgttaccagccctgtaccttgaccacttccagtaccattcactaaagcatctgcaatagcttccattacacaattagtaagttcatcagtcatatatgcttcaaatgcttggatagacattttcttagctgcagcactgatagaaaatactttaatgatctcatagcctttaaatgatacagttgctgttgaaacattttcactttctactggcgccccttctacatgccattgtgccttactagaaggtgttccgattggtacactaatattagttgggatattaaagttacggcaatgtgagattaatccgcccattgtacgtgctttcttgataacctcatttaacgtagttgtaggcaatacagctgcactattcgttgttgtgttaaatgcatccgctcggtgttccgcttcttgaatttccatcgctcggttaaatgttcttgtttcaatatctgtaagcttttgccctagcattgttttatagaatgcactgcggtattctgcgctgccaaaaatattttctgttggtacttgttgcccctggttaaagttcattccagtaatcggattgaattggctacgttgtgccgttccttcgtttgctggtggtgtttgagtttgactttgttgtgcttgtttttctttttctttactgttattcattgcttgttgcaacccttcgatttcaatattgatagatgtaatatctgcatttggatcagtatcaactgtacccttaatttgtgctgctcttgtttccatttctgctaaagaatgattacgataaaaattaaatgcctctgctactgtagtgaatttcatattcttacactctcctcattaataattgattaatttttatttttaatgcttgtctttctgttgatttcaacatttcccatgaactttcaatagctgcccttgcctccacactcgtttgaggatatgcaggaaatggacaaatactaaactcatagactttttcaattttggttattgttcttgtgttcgtctttgcatcaaattggctgccgccttctggtactttaaaagcaaaggacattcccgataggtcttggcgccttactgccgtataaacgctttttccctcttcggtttctggtaattccgccctcattgttaatcctgccgaatctaacgcaaaggacattgttttaggtgttcttgctaaagggattttactcatatcatggttatacagtaagcgaatatccgataaatcagctttatctaatgcgccccttttaataatctcgatatattccccaaatggtgcttttatggtggtaggctgatcgtacacaatcggtctaccatttagaataaggctgctgtcacctgccggctcggctgctcttagttctgctactctcaattctttcattggttattacccccttgttctttaagttgatattgatcggcttttgctgcattaactacatttaatgtttgtagtcgcttgtcaccgtcctcaactggtggtaggtttaaaatttctaatgcttgatttattgtgaataagcctaacggcattaattccttaatgatgtttgtttttgtttcattactagcaaactgcaacctattcgcttcaaaaataatagaattcccaaaggactgctcacgctctgtgaaaagcttgtccgtcaattctaaagagaattgaattgctaaaggctctaatacactttcataaaacgccgcccagtcttcctctgaataagtgctattcacaatggattcactaatacccaaatactcatagattttctttttcaccgcttcaagctgcttatcatcaatagttgtcggctttgtttctagtgggatatagtcatatttattgtctattgctgcgattccaccattgttgccaatggataagtaatcattggtgaaagcttctttttcttcttttagcttctcaggtgataaaacttgattgtatttcaagatacctctaatagttgcattggattttattgcattgctcaacccttcattttgcgtatgtgccaaatctaacgctggcaaaatagctgtattggtatcacctaatagatcattagaattaaagaaacgtcttactataaatacctctgaaaaatgcaatgtgacttgttgaccattcgcaaataagaaacgacaatacatttcacctgttagatcggtgaggtattccacactttgaggtgacaatggatatatagcaactaaattacctttgtcgtccttttctaagtaagcaaaagcattattgtaaagatagtaatgagtaaccaacttataaataagatcatatgccgtcatataagggttcggtcttacttgtaaaatccgatttaaattataatcaccctttttccgacggtctgatgatgtcattacatgcgttccttttagctttgcagcatttctagctatgctatccacagccgccctataaatatcactttcataagcgttaccgctaaaaggtgtaaatattgctggtccaccgctcataacatctgctctttctgtcttctgcagttcttttttacggttaaaaattttattgaaaaaactcgccatttactcaccacctctcatctagccatattttctttctacctgtctctatttcgtattcttgtataagcttcataaggtctaaacgatctaccattaccttttcatcatcacgatgaatttctaattgttccttcaatcgttctaatatttcattcatgaggtttcccccatcctcacaacctctttacccgataatttcatctttttaaggatatagcctgtacgaatataaggactatcttcctcaaaacaatgtgcatctctatgtccttcacctattccatgatgatgaaactttccacagtattgacaccatgtactaagatttccttttttatcacgttcaattgctagtacggttggaatttttttaattgccatttctaccatccttattcatttgattagtaccaagagttctagacagttccagcgcatttcttatttagtacttccgcaaaaacattgtcatatcaacatattctccacttcagttcttaaagttccaaaagtaccacgttttttcaaagtacatatatatgggttttatagaaaaaagttatgaatagttttttctataaaatatatatttattttcttagtactcttggtacttttagtactattcgtattgaatacttgctatatcaatgtttttaggagtaccaaatctataaaatgaactttattttcttagtactcttggtaccccttagttattaggtggattttcttcaaaatcaaaacctaattgttggacaatctctttatttatagttacagcattgatttttcgccctttatggctaattttttgataatcaactgctttcccatctaaaacattaggaacagtaaatccccttttcaaccactcttttctagtccttttttcttctggtcctaagaactcttttaaaaaagatggtgttaaacaaattgaactaaacttataaattgctttgatatttttgggagcatagtcataataaataccatccctattactatccaagtaagttaaaatttcattcaatagttcttttggtttatctattgctttattttcttgggcaatttcgtcaaaaagcttgtccagttgctcaagatctacactaaccttgaaaaattcttttaggagtctacctgcataatggactgttgcataataaagggataatcttgttaaaacctcatttccctgtgctttattcatataaaaatctttaaatttataaaaagatgggagcaactccttcttacgtacttggtactgttttaaaaactctaaaccaattactccataatttgtttctagccccttatataaatcagcgaagaatatataatctactccttcaaatgggctatcatttaaactcacaattcgagcagcagctcccccagctttagatgcatattcatttagacttacttctccagtagttaacatgatatttttccatgtattttctctttgcgaaccactaagagaacccctacctttagacttccctccactgaagttataaacaatggattgaagtaatctttcatccgctttacggctatcatccattaacaaaggaaaactgtttaagaaggatgctttacgttcaatactaactttggttgcgttaaattcatttacaagttcacttgtcccccacacgctggctgcaacttttaatacgcttgtttttccttttgaagttccgctagaaagatccacaatgaaaggatctatttttaaatcatgaagcagtacactagcaaaggatgctaatacaaaaaataatgctctcggatgggctttaatacgattaaatacttcatctatccacccttggactgtcccagctacttggaatgattcaaaaagttgctgctctccttgatcattaggcagtatttcataatctgttgctagtaatggatgggccaaaccacttttcacataacctaaacggtctaccatcagccctctatcaatctcggtaaacgctaaaaccttatcaaagtaatctattaactgctttatgttattatcatttgaaggaaaccctttatctgctaatggcatcatctccctcttagtgaccaatgctccagctggaacaatctcggtgacgaccttccctctatcattccaggttaactcataatataattgttgacgttcaacgttatgtagttctctttttagaatcggaacatgcctagcaaccatgatttcccgttcatcaagttctccattcttgaccttagtttccactctatataaagcattatttttaactttgtaaggagatggaatatttacaggaatgatagaatcctcttgttttttctcattatcgtttgttattccctcatccgcttttccttcattgaccttcttataggccgaattaacaacctttgtaatatccttaataagaaacccttttttgaaggaaacaaagtatttgtgagccaatttaagactggacaatacttcctttttgctcaccttacaaattaataaccttctggctaaatcataaaaatccccatcacgtgaaccgttagtttcatatggataactcataggtgaaggtgttttcgcaccattccatgctttatataagaactgtggaagctcgtccaatttttctagactttgagttacaacatgacgcccttctgtattttcggtcgggaatacgatataacccttttccactgctcgtgtatcttgtgttaaccctaaacgattaacgtaattctgatactgaccttcttttttcgttaaatccgtttcgcctttgaatataaactgccagccattaggagttttaattaaatggtgatgaatgttttctccttcaagtaattctcttagtaactgaccttctttagaatcgtcaatgtcgacaatgaaaataccttttggaacaacacaccctatccagccaccttgaccaagccatccattaatttgatcgttatctaatgaatgcgtgactttccaagaacctactggtgtttttgctttttgatactcttgattgccctttgcatatccagtaagcttaataattttcgctccaggcattatgttgttaattgcttctgtataattcgctgctgtagataacaacttctcacctcccttgtcacaagacgaactcaatgttaaaatataagtagataaataattgttcttgaggatatatgaattcgcagttcatatatctttttttattgtcttttttcaccattctttactacctctttaaataatccatctttaatttcatctactctttcatattctttatttaattcattcatcgtatgattgagcaggcgccaatacactcttagctttctatgaaacccacgaaaacaataaatttcctcacctttgtataccgctgtatccatatcctctactaagtgcgctaaaagaacttctacatctgttaaagtcgcaacgcttactcccagcgatcctaattcaccatcaagttcacttgtgaaattttttaaatttggttgttcattgactgctactaattgatccatatttctaacgctccttatttactattgttaatttcgtataatcttttcttagcttcaaactccatagcttctaaaatctcaggattttttcttgctacagcacatcgttttacaatttcatgcgccttcattaacctcgttgcagacaatactccgttcatatgtattcacctcatttttttaatttgacgttgcaaccgtctttttttcagctatcatttccaacattgcatttatgttcggtccgcaatagaccatctgaccaacaaaatattagtagctttttatattttcatagtttcctatttatccttacgcatccagtcaaggatatcccaacgattcaaacgaataacttgtccccttttaaaataaggtatttcatttgtagctattaatgatcgtacggttggaatacttactttcatatattcagctgcttccttaattgtaaaaatatcatcttgcattttttcttcctgcagttcctcttttaactcacgtaataaacttttcaaatcagaacgagaagttatcaacgtatcatctggtaactcaaattttaaattcactactcaccctcctttttaataagttctttaaagtaaaacattcaatatgatagatatacataacttttgatgatttttactactatttgttgtattttcttgttgtaagacaataatatacctcattgagttgttgtgtcaacggtttttatttatttttacttcatttagttgtaatgtttattatttttccatataatacaagcaaggagggtaaacaacatgcaagaaaacataggtaaggtaattaaagaaattcgaaaggcgaaaggaatttcagcatttgtattaggagaaatgataggagtatctcaacaagcaatttcccaatatgaaaacggcaaaagaaaaatttcctttgaagtactgaataatatagctaaggcacttaatgttcctatggatacttttttatttgtaaatcatgaagcaatagaacagaaaattgctgaaagaggtgtagaggctttagaaaaggagccaagtttatttaacgataaaaccgctaaaggactactaaaactttcagatgacctaaacttctttgaaagcttcttagaaagtctgggttatcataaggagactcttaatactaacggagaatatcacctaaatttaagtccaactagtacaaatcaaataaccgacactgaaacaaatgaacatgttattttaagcggccgtgaatatctcgaattttatgaaagaatatctagggttattgattttgaattcaatgaactaaaaagaaaaaaagattctactaatgctataaatcagttatttggacaagatgaactattataggtggactgcctgcctataatagttaatttattatattgaggtgataaaatggcttcattccaaaagtatgaaacaaaacaaggctataaatggttgttaatcgctgaaattggtattgatccagcaacagggaaaaggaagcagaaaaaagtaaggggttttaaaacaaaaaaagaagcccaattagctgcagcaagcatagagcaagaagtagctaatggaacttacatcaatgaacctgacatattatttaaagattttgtgcaagagtggcttaacatttacagcaaaagcaccaaaataagtagcctacgtgttagacaaaagcagtcggataaattagtcgactttttcgcaaacatcaaaatgaaagatatcacaaaaaagatgtatcaaacagctttaaatgatttacatgataaaggatatgcgtttaatacacttgatggcatccatacagcaggtagaatgatttttaaaaaggctatagagttacaaataataaaattcaaccctacagataacgtaaaactccctagaaaggtggagacagtagaagatatagaaaacgataagaaggctataaaatacctggagaaagaagaattagcgcatttcttacaggtcgcaaaggaaaaaggattagataacgattatgtatttttttctgttttagcatacagtggattgcgtgccggggaattattagctttaaagtggactgatgtagactttgaaaacaatactatcaaaataactaagacgttatataatccagataacaatagccaacgctatcatttacttacaccaaagactaaaggttctatcagaaccattaaaatggatcatggtatcatgaaattgctaaaaagccataaagcaaaacaaaatgagttaaagctatacacacgtcctaaatacgtagatcaaggctttattattacaaaagcaagcggctatcccgaagtaattaaaatggttcagaatagattaaagcgccttataaagttatccaatataacaaaaaatattactcctcattcattcaggcatacacatacatcgttacttattgaggctggtgtaggtattaaagaaatccaacaacgtttagggcatacagacatcgaaactactatgaacatatatgcacacatgacaaaaaatatggaagaaaaagcctctcaaaagttcagcgaactaatgaaaggcttcgtaatttaaatattagtgaccaaagcgtgaccgaaacgtaactattgaggctcaaaagctttatatatcaagctttaaccttaatggttacatcattccgcccataccacccatgcccatgccgcccatgtcaggcattgctggtgcatttggttctggtttgtcagctactacagcttcagttgttaagaacatagctgcaacagatgctgcgttttgaagtgcagaacgagttactttagctggatctacgataccagactcaagcatgttaacccattcgccagtagctgcgttgaaaccaacgcctactttttcgccttttagacgctctacaactacagatccttctagaccagcgttgattgcgatttgacgaactggctcttctagtgcgcgaagtacgatgttgatacctgttgcttcgtcgccttcagctacgatagaagctacttttgtgtatacgttcataagtgaagtaccaccacctgcaacgataccttcttctactgctgcacgagttgagttaagtgcatcttcaatacgaagtttgcgttctttcaactcagtttcagttgctgcacctactttaattaccgctacgccacctgcaagttttgcaagacgctcttgtaatttttcacgatcgaattcagaagttgtttcttctaattgcgcacggatttgaccgatgcgagcttcgatttgttctgtgcttcctacaccttcaactacagttgtgttttcttttgtaacaacaactttaccagcgcgtcctaaagattcaactgtagcagattttaagtcacgacctaattcttcagtgattacttcgccacctgttaagatcgcgatatcttctagcattgctttacgacggtcaccaaatccaggagctttaacagctactacattgaatgtaccacgaagtttgttcactactaatgtagctaacgcttcgccttctacatcttcagcaatgataagaagtggtttaccttgttgtaccacttgctctaatactggtaagatttcttgaatgttagaaatctttttgtcagtgattaagatgtatgggttatcaagaactgcttccattttgtcagaatcagtaatcatgtaaggagatgcatatccacgatcaaattgcataccttctactacgtctaattctgttgtgaagcctttagattcttctaaagtaataacgccgtcgttaccaacgcgctccattgcttcagcgattaattgacctacttcttcgtcagcagcagaaatagcagctacttgtgcgatagaagatttaccttcgattggtttagaaatcgtttttaattcttcaattgcagcagtaacagctttttcgatacctttacgaagacccattgggttcgcaccagctgttacgtttttaagaccttcacgaatcatagcttgcgctaatacagttgcagttgttgttccgtcaccagctacgtcatttgttttgctagcaacttctgctactagtttcgcacccatgttttcgaatgcatcttctaattcgatttcttttgcgattgttacaccgtcatttgtaataagtggtgaaccgaattttttctcaagaacaacgttacgaccttttggtccaagcgttacttttactgcatttgcaagagtgtcgacaccgcgaagcatcgaacgacgtgcttcttcactaaatttaatatcttttgccataataattgacccccttggattttttaagatttatataattaaccgataactgctaaaatgtcactttcacgtaaaatcaagtagtctgtaccttcatatttcacttcagtacctgcatattttgagaagatgataagatcacctgctgctacctctaaagcaacacgctcaccattctcaagcactcgaccagtacctactgcaacaactttaccctcttgtggtttttcttttgcagtatctggtaatacgataccacttgctgttttttcttctgcttgaacaagctcaattacaacgcgatcacctaatggctttagcatgaacaataacctcctcattttgttatgtaaatttcttttattagcactcaagtcatccgagtgctaacacacttataataataaataatctcaatttcttttgcaagtaaaaaaatcataattttttcgcaaatcactatataaactttctatatagaatactgcctttactatatgaatcgttgtttccactgctcgtatgttacaatatgaaaggacaccctaagttgttttcgctacacacacaactttctcctgtcttctattataatttcaaataaggatttacgaaaaaaacataattcaagtgaggtttatatcgtaggtagcatatttacatgttatcctaacttatctcatacactatagttagaaaggatggttaaaccatttgaagaaacaatactggtggattatcgttacatacattttaatgcagttatctggcgttgttggattgccacttctcctaaaaacaggactctatgataatagaggatttaccattgaggaaaaaggacaaatcataacgggacactgggcaattattagcttctttgttgcattatgtatcgtactttggttacttagaacagatattcgtgacaggcatttagatccaaagcgctcttctgctccagctactattggatggattttcatcgggttcttcttagctttcttttcacaaatagttgccggtatgatcgagatgcagctgctaggaattaaacaaggttcagaaaatacaatgaaactaatggagattgcaagaacgaccccttggttccttattgttgtatctataattggacctatcttagaagaaatcgtatttagaaaaattttatttggtgcactttataagaagtttaacttctttatcgcagctatcattagttcgcttgtattcgcagcaattcattttgattttactcatttattggtatacactgctatggggctcgtattcgccttcttatatgtgaagacgaaacggattatcgttccgattgcagctcatgttgcgatgaatacattggtcgctattgggcaaatttttatgagcaatgaacaaattcaagaaatgattaaagaagctgaaaaaatgcaaggctttatcggaggattttttgtatgagaaactcaccattgttcatggctgcactatacttccttcttggatgtatctttacacgcttcgccattacgaacgtgacagatacaatctggaatatgtggacaatactatttgcagttatggcaacaattgattttaatttggcacttcgccttatattaattaaattcacaaagaagaaacaataataaaacgcagaggtcgcttcctctgcgttttattgtggatagtttttcaaaaagtaaactaatgtttgtaactctacagctaagtcaatatgatgaattctaatattctctgatacgtttaatcgcgctggtgtgaaattcaaaataccatgcacgctcgtttcagctaatctatctgctacagcttgtgctactgtagccggtactgttaatattgccacttgtatatcatttgataatctctcttctaattcatctaaatgatatacaggaatgcccccgatttctgttccaactttctcttcactaacatcaaatgccatttcaatttttgtattattgtttttcgtgaaattataatgtaagaaagcggtccctaaattacctactccaataagtgctacacgtgttatatcatcttgatcaagtgtttcgcggaaaaatgataatagataatttacgttatatccatatccctttttccctaacgctccaaaatacgaaaaatctcttcgtattgttgcggaatctacttttactgcctcactcaattcggccgatgaaacacgctgcttaccagaaagagataagttttggataaatcgatagtatagaggcaatcttttagcagtggcttgtggaatcttttgctgatccatatgacctctcctctcttcctatctttattcatatactttaatcaaatacagaagtttagcactcattaaattccttgtataataaagagaagaagtattctctctttattttaaactatacactatttttagtatgattgagaaatataaacatggcaaagttaagaaattatttgaggtgaaaacattgattttattacaagtaaacgcgctttcgaaattatacggtgcagaaacgattcttgcaaacataaaattggaagtacaaacaaaagatcgtatcgcattagttggaaggaatggagcaggcaaatctacattattaaaaattatcgctggtgaattatctcatgatggtggcgaaattataaaaccgaaagatgtctcaatcggatatttagctcaaaatactggactagaaacgtctttaacaatttgggatgaaatgctaaccgtctttacccacttacagcaaatggagacaaaacttcgaaggcttgagcaagaaatgggaaaagaagaaaacttttcaaacgaagctacatatgaaagattgttagctgattatgaccaattgcaactcaattataaagatcaaggtggatatcaatatgaagcggatattcgctccattttaagcggccttggcttcccagttgaaacgcaccagacgacgatctctactttaagcggcgggcaaaaaacaagattagctctcgggaaattattattaacaaaaccagacttacttattttggatgagcctacaaaccatttagacatcgaaacattaacgtggcttgagcaatatttacaaggttatcctggcgcaatattaatcgtttcacatgaccgttatttcttagacaaactcgttacacaagtatatgaaatttcgaataaagaaagcagacgatttgttggtaactacagtaaatatttagacttaaaatcagcattatatgagcaagaaatgaaacgttacgaaaaacaacaagatgaaatcgcaaaacttgaggacttcgttcaaaagaatatagctcgcgcttctacaacgaaacgtgctcaaagtcgtcgtaaacaactagacagaatggaattattaacgagaccattaggggattctaagtcagcatcattccacttcgatattgaaaagcaaagtggaaatgatgttttacaagtaaatgatgcaaccatcggctatgatgagaaccctataattgaacatgtaactatgcgcttaactcgcggagatagtgttgctttagttggtccaaacggaattgggaaatccacattgttaaagtctattgtgaataagttaccactattaaatggtgatgtttctttcggatcaaatgtatctgttggttattatgatcaagaacaagcaaacttaacatcttctaaacgggttttaaatgaactatgggatgaatatccactgcaacctgaaaaagaaatccgtactatactcgggaattttttattcacaggagatgatgtactgaaaccagtatcttcccttagtggtggacaaaaagctcgattagctcttgcaaaacttatgatgcaaaaatcaaatttattaattctagatgaacctacgaaccaccttgatttaaacagtaaagaaattttggagaatgctttaattgattatccagggactcttctattcgtctcacatgaccgctactttattaaccgtgtaacaacgactgtggttgagttatcaacagaaggtgcacaggaatatttaggggattacgattactacgttgaaaagaaaaatgaaatgattgaacgtgcagaacttgaacagcaagaaagtgacattcctgttcaaaaggtggttgcacaagagaaattaaattatttagaagaaaaagagcgtaaaaaactagagcgtcaacgcactagaaaaattgaagagctagaacaaagtatattagaattagaagaagaaattgctacgttagaagatcaactttgcttaccagaaatatatgcagattatgaaaaagctagtgaaattacaactaaaaagcaaacgctacaagaacaacttgaaacttgtatggcagaatgggaagagctgcatgtataagcatatttaaataagaaagatgtctcataagtcaggatttttgactatgcgacatctttttttcttttaatacagaaacaattttttgagtatatcaatcgtaacttagaatataccaacgatttttcaaatatatctattgtaaccctatatatattaacagttcgacacgaaatatcgatttaacgacaaagattgacaatattagcatcttctataatagggggatgtttcaaaatgtttttcggggatatcttcttactttttatttcccgaaaaagaacaaacacaaaggtctgacatcatcctatttatccacaagtttatacacatatccacctttataaaataaaccttaaaataacttttccacattatccacaattaataaaaaagttatcaacattttatatacacaataaaacccacattatcaacagacaatatgggttttatccacaacctgtggttaattatgtgtataactatgcttcaatatctaatcctggatttgcatttaaggctaatgttgcacgcttaccttgttcataagcaattgtccctgccgctgcaatcatcgctgcattatctgtgcataaagatagcggcggaataattaattcaatgttttctttttgtgcaaattcctcttctaatcgcgcacgaagtcctttattagcagctactccaccagcaagaagtaattgctttacattataagcttctgctgcacgagctgctttcgttacaagtacatctattacactttcttggaaacttgccgctaaatcttctggcgcaatttctataccgcgttgttttgcgttatgcacagtgttgataactgctgatttcaatccactaaagctaaaatcatatgaatccggttctagccatgcacgaggcaaatcaattgtcggttctccttcatgtgcaaggcgatcaatatgaggaccacctggatatggcatagataacgtacgagctactttatcatatgcttctccagctgcatcgtctcgtgtttcaccaattacttcgaatgaaccatgttctttcatataaacaagttccgtatgcccaccagatacaacaagtgataataacgggaattgaacttcttttactaaacggttcgcataaatatgaccagcaatatgatgaacaccgactaacggaatatcatgtgcaaacgctactgccttcgctgcatttactccaattagaagtgctcctactaaaccaggaccttctgttacagcaattgcatcaatatcatcaaatgtgatgtttgcttcctttaaagcttcttctaacacaactgtaatttcttctacatgatgacgggatgcaatctctggtacaacgccgccaaaacgtttatgactttcaatttgtgatgcaacgacattcgcaataatttccgttccatttttaacaactgctactgctgtttcatcacaacttgtttcaataccaagtataatcgtatttttttccattatatattcacccacattacgagaccatcttcctgattgtctgcatagtatcgtttacgaatcccaccattttgaaatccgtattttctgtataactgctttgctacttcatttgatacacgtacttcaagtgtcattgtttttacccctagttctttcgcttcagaaataactgctttcaatagggcatctcctaacttttgacctcggtattctggcaaaatagctatatttgttatatgtgattcatcaataattatccacaatccacaatacccgactacacgaccatctttttctaacacaatataatgtgcatgttcattcatcgttaattcacggtgaaaggcatctgcagtccaaggagttgaaaaagacgcttcttcaatagctacaatttgagcaatatcatcaagctccatctttctaaatatcatatccatcttctgcaagctcctacttgttttgactttctaaccactttgtttcagcttcagctaaacgaagatagcttggaacaaacgtatgcacatcttgttcttctttttgtaatcctaagaatgctagctcacttggtcttgggttatttttagtaaatggagcgaatacagcttgatcacctaaatgttctataattgtttctttatgcaatttaacatcgttaccgataaataaaacaggctgtcctttatcttttaacatttgcaaccagtccacaataagaataattcggtcttcttctattgaagttaactgctctccttcatatgtatataacccagtataaatttgcccacgtcttccatcaaataaaggacaaattaacccgctaaagttagcaccgtttgcagctactacctctaaacttgatacacctacaattggtatttgaagtgaccaagctaatgttttcgccgctgtcacgcctatgcgaacacctgtataggatccaggtccagcagctacaacgattttagttaattccttcggttttacgccacactcttttaacagtttctctacagctggcataagacgtacagaatggttttttgttaaatttgtaatgatttccccaattacgtttccttcctcaataagggatacacccattacgtaatttgaagtatcaattgctagtactttcatcttgtaatagctcctcacataatctaatatagcgatctccaattggctcgagtataatttttcttgtgtcatctccagcatggaataaactaatttgtaacttttcatttggtaaatatgcctctattaaatgagcccattctactaccgtaattcctttaccgtagaaatattcatcaaagcctaagtcctcttcactttctgctaagcgatacacgtccatatgatatagcggtaatcttcctttatattctttaatgatattaaaggtaggactatttacaactcttttcactccaagaccttttgctagtccctttgtaaaagtcgtcttaccagctccaagatctccttctaaaataattacgtcttgtgcctctacgagcttacctagtttttctgataacctttgtgtttcctcagaagattttgttgttacttcatatttactcacagacttcacctactttactcacaatgttctctgctctttattatacaggttttgaatatataaaaaagtccttaggagttgtcctaaggatagtttgactgtctttattagttttttgttaaaacaaataaaaaaatacgaaacaacttgtttcgttcttttctttatatgaaatggcggtcccgaccggggtcgaaccggcgatctcctgcgtgacaggcaggcatgttaaccactacaccacgggaccatttggttgcggggacaggatttgaacctgcgaccttcgggttatgagcccgacgagctaccgtgctgctccaccccgcgacaatataaatagcttggcgacgtcctactctcacagggacaaggtcccaactaccatcggcgctagagagcttaacttccgtgttcggtatgggaacgggtgtgacctctctgccatcatcaccaaactatgaaggcatattccttcaaaactagataacattgctacatattatatggttaagtcctcgatctattagtattcgtcagctccacatgtcaccatttcaattaatggaaaaccgtagagtttctatccttaagttgatgggcatggggtgactccattctttgaagtaaaatttcttcagcttgttttattttatttaaatcctttttggataattggctccttttatttgcatcacgatcattcagtaatactttcccaaagtatatagaaagcaattcgagcgctttactttctatttcgagttgattaatacgatccttttggggattctctaacattctcttaataatattagatgttagggcatcaatgggggtttgaaactttttaaaagattgatttcctattatagtatgaaaatcatgacttttttcaatagcacaatttagcatgaaatgattaaacaactgtacaggaattccaattgctaatgaatatagtggagtttctttttcatattcaaatagaacttcaaagtcattcataaagtataaatagctattcccagccattaatttatttgtagagtaaccaacttgtacttccccggatccttgtaaacaaaaattaagttccaccattgctgcatccgatgcaaattgaatgcgatggtttttatggaactggtaatttgatagcactatttccattccagaaaacgagctccaccttcgcacttcacccatacctattgtttttggcacatacatatatctttcttctacaacttgtaacccatgaaaatatttactaaaaatatcatgaaaactgttagtcttcatgaaatccacactccttttatatacaaattacaatcaattgataatcattttcaattataacaaatatctttatacaataaatagcttttacctttatatctcgttatgataaaagaaaaagaaagcgagccgacaatgaataaaaaaattgcaattattactggggcttcaagtggattcggcctattagcaacgcttgaacttgcgaaaaaagactatttagtcattgctacaatgcgaaacctagaaaaacaaggaaccttactatctcaagttactgaactcaacttacagcaaaatataaaagttcaacaattagatgtaacagatcaaaattctatacataactttcaattatatataaaagcaataaacagagtagacctacttattaataacgcaggatatgcaaatgggggctttgtagaagaaattccagtagaggaataccgcaaacaatttgaaacgaacctatttggggctatatcaattactcagcttgtcttaccgtatatgagaaaacaaagaagtggaaaaatcattaatattagcagcattagcggccaagttggattccctggtttatctccttatgtatcttcaaaatatgcattagaaggctggagtgaatcacttcgcttagaagtaaaacctttcggaatagatgttgctttaattgaaccaggttcttataacacaaacatatgggaggttgggaaacaactcgctgaaaaccaatctgatacaacatctccttacaaagagtatatggataaaatacaaaaacatattaatagcggcagtgatacatttggtaatccgatagatgttgctaataaaattgcagaaattgctgaatctaagcgtacaaatttacgatatccaatcggtaaaggtgtgaaatttatgatctttgcgaagaagattcttccttggagattgtgggaacaccttgttttgagaagctttaagaaaatgtaataaactttttgaaaactattttgaaagggatgctaattaaatgttaggtttaccgtatgggaaagtgtttttagtgccgtggactgaagaatgggaaattgagtttatgaaagagaaacaactcattgaggaacaaattggcgaacatattttagcaatacaccatattggtagtacttctattccatatttaagtgcaaagccaattattgatatagcaattgaattagaaaattatacggacggtatacattgtattaaaaagttagaactactaaactataaatatagaaaagaagtattacccgaaagatactattttaataaaggtgaaccaagaactcatcaaattcatatgtatgaacaagggaatacatatttaatagaacaattacaatttcgtgattacttaatagacaataaaactgcacgcatgcagtatgaacagttaaagattcaactttcacaagctaatcctactgataaacataagtatgcagaggataaaactaatttcattacatctatattaactaaaataaatgcttaaataaacaagaaaccatttagtagtaaatggtttcttgtttattagttatttcattatttgtactatcaaatttttattatacagcaggtggaaagaagtaaaatagtatcgaagtcataaaaataaacgtgaataccccaattaccgaaaatatatattctttcgactctctatcatacttccattccatcaatgctcttaagattaacgtcccacctaaataagtaaaaatgacataagcaatattaatactttcaaatttaaagataaacataaagctagttattaaataaataaaaagtagtcctatttccaattttttatgtaaactatttacatgttttttatatccccaaaaaccacccttgggcatattcaatttttttcttaaaaacttatcgagaaaatagacagctatacaaaaaacaatagttataatccaaaaagtagaacctcccattttcccccctcctattatttcatttaattacttgaaataaattggactatattacggttatccccttctaaataacttatgatgccttcaggatatgtcggcttctcctgtaattcctctagacttttccaaattaatataatatcctcatgctctttatgccttatttcatttgtaatgattttttcaacagtcccccaatgtatcaatgtacaatgatgacctttttcgttgtcccactcaaaaatgtgttcatttacaattgctaactcttgaacatcaactttcaaatcgtattcttctattaactctcgaattattgcttcttttgacgtttcaccaaattcaatagagccacctggaaaacgataaaatgattcattttcattgcattgtacaagtactttagaatgatcttcatttaaaatcattgcttcagcacgtaatttaggatttttcattttgtctccccattcattccacatatgattaaatccaataggtataaaagaaaaaattaagaataattcctgttattactaatagcggaaccgttcctaaagaaatgacatattccctcgattctttatcaaatttccactccataaatgattgaaagcagtataaagttattaaaaataaaatgggtaaattactaatataaacgggatttaaagtagcacatatcatcgtaaaaattatataagaaataataagagccctagtgccccatttatgaaagttgtttacatatttactattccagtctgtttgtttcggtatatttagttttttcctcactactttttcaaaaacaactaaggatataatccatactattaataaaattcctttaacccaaaacagtgatgtttcctcctttaccttttctccggctgatcactcggatacgtagcattccttttattttctacgtcccaactaataattgtcgcactatcacgtcccaactgatgatgcacgtgttctaaaacattgtgaatattttctttaagtgttttatcatttctgtgcatagcaatatgcaaatttaaaggtatttcatatcggcgctccccgcattctaatactccatctgtcaccattacaattcggttctttccagtacgtaattcacgaatacctgatgaatagcaaggaacaggtaaatcaaatgtgtttacatttccaatccattcgtaaaaatgacgttgatttaatgcatattgtcctaacttatgtaactcttcatgaaatacatacactaaacaatcaccgatagaaagccaccatatataattttctttccttacacatagtaagcaagctgtttcacctttaatttttttgcacttttccttaaatgaagatgactgaaaaattgtaagtatatgattttcaacagactgaaacactgtattaattggttcattcaaaattacttttatattttcatattctttttcgattgtatttactactaactcaacactttccgcactattatgtccatctagaatagctgcaaattcccattcaccatttgaccaaactaatgcaccatcttcattctttttcgctccagcacttatattcccaccatatttaccaagtacaatatcaccatattgtttaactgaaatttctcctaaacacatttctatatttccaacccatgaatattgtgtattattttttgtatgcatactcatttaccatatactttcgtattctttcacatagtttttttattttctcttcgtcaccatatggtgcgccagtccatttcgctatctcggttggtgaccaaaactcttttggtgtattcggataacgcggaataatgtgcatatgcatatgtggtacaccatttcctgaaacaaaagtgtaaatatgctctgcaccttcgctttcttttaacgctttacttactctacttgttataagtccgaacgctttcgcttcttcatctgttagttcagcaaggccaggtacatgtctttttatatctatcattacataacccaggtatgtttcttcactatcccagtggacatgtccaacgtaaacgagttcatcttcgtaaatagctccacctggaactataatatttcctatatgttttttgcaaatgaaacagttttgttctatttgattgtttgttgacatatccatcaccttccttttcatatataatatcacaaaaaaaggaaaaacaggtttagtattccgaattttcattcttttgatacaacaatttttgaaatgaatttacatctcattatttcttcaaaaacgcaatcccaattataatcccaatcacaattccgattactaaattatttgtaaagtgcccttgaaatacaccaattacaactcctataccgacacctattgccaaagcatcatttctttttttatttttagccaaaattacatctcctcccatcatttctccctaaataacatacatttacttgaatgtattaatataaggactatctcgcttaaatatttccaaaaaatgtactgtaactttacatataatattttccattttctgtacatactccttttatattggaaaattttcaagtaactattaattatacataggcatttactataagaaagcttcgtaatttattgaaggaggaacgattcaaatgtatcctcattggaatccaaatataaatcaacagtatgtttattcccctcatcccgcaaggaatacattgcatcatgattcacaatatatgatgcagcgtattgcaagtcttgaaaatcaattaactaaattaatctcattaatcgaggaaaataatcaattaattaaatcaatggaacaacaaaaaaaccaagtttgtgcaccagctggaggttctgttatcgttcgtatgtgatctggatgcaataaaaaacacactttgtattataaaagtgtgttttttattcattattttcttttcgtatggaacccttgtgtaattcgatctaatataattgcgattactacgatagctaatccagcttcaaatcccattccgatattaacttgtgttacagagcgatatacatcaactccaagtcctggagctcctacaagtgatgctgttacaaccatcgataacgaaagcataatgctttggttcacaccagccataatcgttccggttgcaagtggtaattgtactttaaatagtttttgtgatgctgtggatccaaatgcattcgctgcttcaattaaatcttctggaacttgtctaattcctaagtcagtaaaacgaattgtcggtggcattgcaaagattactgatgcaataattccaggtactacacctactccgaaaaatgtaatcgctggaataaggtatacgaatgcaggcattgtttgcataaaatctaatgttggttttaaaaattttgagaaacgttcattttgagatgctaatataccaattggaattccgacaataattgaaataataacagacgtaagtacgagtgctaatgtttgcattgtttgtgcccagtagttaatattcaaaataaataataatccaataagcgtaaaaatgactaaagataatttcctcgttgtgtaccaaatgaggaaacataagataataatcatcaatatggcgggtattattgttaaaaaattagtgagtaaatcaacaaatccgccaataatataagagaatcctcggaataagccttcaaagtgctcatataaacttgcaacaaatgagtcgacccattcccctaatggaatccgcggtatactattcatcgtctttcacctcttcctcaatgtttcctgcaagagcttgaatgacactttcacgtttaataattcctcttagccttttcttctcatcgattactggtaacggatatttcatctctgccatttttgcatatgtctcttccagtaaagtatccaaatacacatgcggaatatcattaagtaataaatcagcaatcggccactgtttttgtactgctttactcgcatcatccgcagttaatatacctaaaaactcatactttttgtttacaacatatacagttgaaacacctgcattcctcataatttgaagggctacacgaggtccacgatcaattaataaagtttctggtcgttttaaaatagactccgccgtaattacttttcctaaattcacatccgcaacaaacttttctacaaattcattagcggggctcatcataatttcttctggtgttccaatttggacgatttctccatctttcattaatgcgatacgatctccaattcgaagcgcttcatctaaatcatgcgtaataaatataatcgttttttccattttatcttgtaactctaacaattcatcttgcatttcttttcgaataagtggatctaatgcactgaatgactcgtccattagtaatacatctggattattcgttagtgcccttgcgattccaacgcgctgttgcataccaccactaagttgacttgggtaattatctttatgatgatcgagtcctactaactgtagcgattctaacgcttttttctctcgctcttcaaccggaactccttgtatttctaaaccatatgcaacattttgtataactgtacgatgcggaaatagagcgaatttctgaaataccatactcattttcgttcttcttactctccgtaactcttcttttcccatcgttgcgatgtcttcaccatctatgtatatatgacctgcagttggtttaatcaattgatttaacatacgaactagcgtagatttcccgctaccagacaaacccataataacgaaaatctctccagagtaaacttcaaacgttgcttttttcaccccaacgttcattcctgtctcttttaaaatttccgatttactttttccttcttttaataaggaaagggccctttgcggatgtttcccgaatacttttgttacgttttcaacacgcacctttgtattatccatgtcactactccttttctacccatctattcacatagtgttgcgattttacaaagaaatattacataaaaatgacattcataagatttctttaaaattctcgtttccgttcataataagaatgcttacttatacatttattttataaggcaaacgttacttaggaggttttcgatgcgaaagaaaatttggtttatatgccttgcattatttattactatgattttcacttcatgtaatgcaacaaatgcaaattcgaaaggaaaaattaaacttggtgtaacaagttggaaagaaaatattgcaaccgcaaacatgtggaaagttttattagaagaaaaaggctacaaagttgagctcatgtatttagaaaaagccgcaatttggactggtgtcgctcgtggtgatgttgatgcgaatttagaagtatggctaccagttacagataaaccgctaaacgatcgttataaagatgatattgtcttaaaatcaaaatggtacgaaggtactggactaggtttagtcgtcccttcttatatgaaaaacataaacagtatcgaagatttaaatgctcataaagatgaactagagaataaaattgtcggtatcgaacccggtagtagtcttatgaatttaacgaataaagcaatgaaagaatatgatataaaactaaaacttgtccaatcctctgaagctgcgatgatgagtgaactaaagaaagcatatacgaaaaagaaaccaatcgctgttacgctttggaatccgcattggggcttttcagaatttgacttaaaatatttaaaagaccctaagaaagtatatggtgaaaaagatgacatttattactctgttcgtaaaggtttcgaaaaagaccatccggatatcataaaatactttgacaaatggaagatgaacgatgaacagcttggtacattaatggtcgagttaaataaaacgaaagatcccgaagaagcggcgcgaaaatggattaagaagaatcaagcgctagttaatgaatggataaaagattaataaaaataggctagagggttaggatatcctctagcctgttttcaacttattttttcgtaacaacgtcatctacaatcccatatgccttcgcttcttctgcagtcataaaataatctctttctgtatcatgtgctactctttcaatcggttgccccgttttttctgcaatcattttattaatatcatgctttaactttaatattcttttcgcagttatttcaatttctgttgcttgcccttgtgcaccaccaagcggctgatgaatcataatttcactgttagggagagcaaaccgttttccttttgctcctgataataataacaatgcaccgaatgatgccgcaaagcccatgcatagcgtttgcacatctggtttaattaaattcatcgtatctaatattgcaaaacctgctgtcgttgaaccgccagggctattgatgtataagaatatatctttttctgcatcttctgcttctaaaaataataattgcgctacgacactactcgctacttgatcattaatttctgagccgataataataatgcggtcttttaataaccttgaatatatatcataggaacgttctcctaattttgtttgttctactacatatggaattgcattcattttaaatccctccaatacttgttatgctgcgtaaagcatataactgtaggaagaagggtttttcacattaaataataagactggctgtttagatggtaatttagtaaaatctattgtcggaagaagcttcgttaataattctggtctttcctcacgaatagatgttacaacaacttcaatatcctctgtgaattcgactatctcaatcccttcttcacttacagttttcagcctatttctactccgaaataaagaagctttcactgcaccttctgatacagaacacactttagcaatatcagcgatactatattgaaaaacatcttttaataataaaattgcggattgctgtacatttaatgaagacaatactttccctaccatttcatgcaaatctgcaatgttctcatgtggttcttcaaaagtgatttgtcctcttattttttcatgaacagacttagacttcatctgatctaaccaacgatttcttgctattttatagacgagtgtcatacaaatatctttatttctatattttcgaagcactttacacactgtttcttgggcgagatcttccccatcccatttgtttttcgttaaaaaagtacagtatctttttaactctccatattgttcaattaaaaagtttatatttgaatgattcatatcgatatgattctttaaaacatgagttacttttgtgcacaaaataaccactccttttcagcgcttacttaataaacgattcaacattaaaaaaagttacggggatataaaaaaataatgtttatgttcaataattcgcggtcataaatatgttatgtacaattttacgtgaggaggaacaaatttgccaaaattaacaattgaaggtgcgggaacttttgatgtgaaagaaggaacaaagttagtattagcaattgaagatagcggtgtcaacattcttcatcgttgcggcgggaatgcacgttgtacaacttgtagagtagaaatactagcaggtgatttctgtgaagcgagtgcgaatgagaaacatgcaatgacggaaaaaggaattgaagatcatttacgattatcttgtcaaatgcgtgtacataaagatatagtcgttcgtccggtacttacagttgaaaattcaggtcttgatgctgggccacgcccggcggagtaaagtgatgaatttaaaacagctcgctggcgaatatgctgctaactttgtaaatgatggcatgaaaattgggcttggtacaggttctactgtatattggacaatacaaaaattaggtgaacgtgtaaaagaaggattatcatttcaagctgtaccaacatcaaaggaaactgaagcattagcacagcaactaaatatccccctaatttcgttaaacgacgtacaaagccttgatcttacaattgatggagcggatgaaattgattcaaatttacaacttataaaaggcggtggtggtgcattacttcgtgaaaaaatcgttgcctcttcctctaaagaactaattatcattgctgatgaatcgaaatttgtaacacatttaggtaattttccattacctgttgaaatcatccctttttcatggaaacaaaccgaaaataaaattcagtctttagggtgtcaaacaacgttacgtttgaaaaatgatgaaacttatataaccgataacaataacctgattatcgattgtatattccctaatcatatttctaatcctgcccatttacacacccaattaaaaatgattactggtgtagttgaaacagggttgtttataagtatgacgagtacagcaattattggtactaaaaatgggataaagaaattgtaataaaagctaactttttaaagttggctttttagtatgttcttcttctcttaatagtgctttattatgatatactaggaaaacgcaaactgattacactagaaaggactgaacattttgcaatccaaacttataacagaacttgctgatttagaaactgcctttcatattcgaaaagaagtatttgtaaaagaacaaggtgtccctcttgcagatgaattcgatacattcgatgaaatcggagagcaatgtaaacatattttagtttattatcatgaacttcctgtaggcacaggtcgtatacgatttgttgatggtgtcggaaaattagaacgtatttgtattttaaaagattatcgtacatacggattaggtaaagtcatcattcaaacgttagaagaacttgctcgtaacgaacaagttacgaaagtgaaactacacggtcaaacacaagctgaaggattttataaaaaattagactatgaaacttcttctgatatatttatggaagatggcattccgcacatacttatgacgaaaatgttatcataataaaaagggtagtatatgaatcttatgtattcatacactacccttttttattaatagaaaagtgaattctcaagattaccttttgcatcaaagcccatcatctcttagttcatacctaagtaaagcttacactgttttccataatgataatgcatatatccagtttggatcaccatttccttgataactctggactgcttcatatacttttccttcgtgtagaactctatctccctttttatatgctttttttgcatcccacgcttcatatgaagcgctttcggtttttgtagtaattgtgaatatatcactctgtacggattcatttccagctacatcaacagctttcactacatatttataagtagtattagcgagcagatttttatccaaataagaagttgtattggatgttgcaatctttttcattgatccttctgtttctctataaatatcataatggtctacaccaatattatcgtcagatggactccacattaaatccacacttgacgctgtcgttcccatactatgtaatccttttggttgtgttggtgcttctgtatcaggagtctcaactgtcgtttttactgtaagcgctgtactttctgtcgatacattgccagctgcgtcaattgcttttacagtataagagtattctgtacttggttgtaacttcttatcaataaaatgagtccctggtactgtatcaatcatctctccgttacggaagatttgatatccttttacccctacattatccgtagaagcgttccatgttagttctacactattcgctgttactttttgcgtctgaagtccatttggaatacttggtgcttctatgtctggtttcacatcattaataagattaacatcaattacattatagaatgcatttgctgtatcagctacatcccatactgctaaaatcacatgatatccactacgatcagtaggtacattgattttatgagttaaattatttgaagctgcagaaccatcatgttgtacagttccaattggttcgaaatctgctcttgttagcgctttatttggattccatccttttttagtaatatagtaatgccacttactcgttaagtgaggcgcagtatacttccaagtaaatgtattttccccaccagtgattgtatttttaaaccaacgattttctgtttgttgatctaaaataccaccaaattttccgcctgctgaagcaatttgtccatctactggaccaccttgtgggaacccttttggagcttctaaactttgtggttcatacataacacttccacagtttacatttagcgcaccataagttggactacataaagcggatcggctaccgggcttttcaacaaaaccgtgcgcataagcattttgaggaataagtgtcgtactaataattccagctgttaatgctacaactcctaaactttttttgttcattttcatattttgtagttgttttaaaaatcgattattcatgttcatgtccccttcttgttatactttgtagtggaatgtgggctttgatgtaaaagaataacaagagacaaacttgtaccgatgtatgtgttaattatgcatacaccgcagtgaaaatatattttttccttgtgaaatatttcactttatgaatatatcatgacatagaactcgcctaagcatgtgcagaagttgtgcagaaacagtgaaattattactaacatataaaaccacatcctgaaatcataaagtaaaactttaattagttggggttttacggtcggttaatacgggataaaataaaagtgtgcagcagaaattgtagacttagttctcaaaattcacatttagtattttcattttttccatttaaacaattcttctcttcttacaacagaaaagtgtctatatcatttaatatagacacttttttcatgtataactttatatttattactgacctacaaatgtaaagatttcatcaacagcttctttatatccacccgatgttcggaatgattccttcaaattcaaagcagcctctttatatgaagggttatttaaaattaactccacactttcacgcaatttctccacggttaattcattcatatgtaattgaactcctgctccaagactctccacttgctttgcaattgctggctgatctgcactttgcggtattacaacgagcggaaccccgttatataatccttcatgcgtactgttcatcccgccgtgtgtaataaatagtttcgtataagtaagcagttcggtttgaggcacatagtttttcacaatgaagtttttagggatttcgcctagatcacttatttttgttttattaccaatagacataacaattgtatgctcactattctcaaaggccttcatacacagtttataaaagtcaatcgcttcattaaaaacagtacctaatgaaatataaatcggacttttttcttcaattgaagtaaaatcaacgtctctgtttttcatttgtgcagagatagatggtcctacaaatttatatgtttcatcaaacgtatcaccaaaaggctgaaactccttaattgtatacacaatagtaagaggtgcaggattacagaaaacttcatacgatgattttatttcaacaccatatttttcagcaattcccttcgttaagttttgaaaatcattctgtattttatcatgaatttctactgggatattttttgacagatgacctaacatttgctcaaaggatttttcatcctgcgcaaaagatgtgcatgaatttatggctggaagtttaagaatttgagcaattaaatggccacaaccaaacatagaatcatgaatcatgtaatcaaaatgttcaccttcaatttgttctagaacgctagatattacaatatccgctgtatgtagaaggccgtttattctttcctgtaaataatttctgcctccagatagaaacgcttttataaatttttgatcatcaatcgttcgtacagtagcacctgtcttctcaatccgatccctgaaagcttctattgaaaaataaacgacctcttcaccacgagaaatcaattcttctacaacttgtaaagttggatttatatgtccttctgatccagcgttaataaataaaacacgcgccataataaacactccttacgttaaatcgtttctatgttggcaagagtacggattttctccatactcttttcttagttgttcgtagcatgttcctactaaattgacctagcgagtctaaaaccgagatcatctatatgaaatgtaggatggcttcgacgacgacaagtagcgccgcaccctctcgctgtttcagcccaactaccaccacgaaaaatgcgatatgatccgtacactgtttcatcatacaaatcataacaccattcccaaacgttccctagcatatcataaagtccccatgcattcggttctttttggccaacgtcatgaatctctccatttgaattttcattataccacgctatatcatgaagtttcccgtatgtatatccggttgtacttgctttacatgcatattgccactctgcctcacatggtaatcggtagccatttgaatctaaattacatttcacaatttgaccaccatcactaatagaataatattcttttaatcccgctttttttgaaagtacattacaaaacgcaatggcatcgttccatgaaatattgacaactggtttatgatttttatcaaaattatttaatggactatttgtaatagcatcatatagttccattgttacagcatacttcgcaagaagaaatggttgaatttgcactagccattctttttttattcgatcatctcttaatactacctctccagctggaatatttaccattaatgaatcgattgtttgaattaaatcattagtcattttctattcctccaaacgttcattttatatgaatttatagtcatatactcattacaaaatacaattttcaaaaagcgttaaatttttcataataaaaaacgattagtttaattaaactaatcggtaagatccaaaaagaattgttgtgtcacattgtattattatatgtgctctaaaaatttccgaacctcatttggagattttaaaacaataacctttttctcttcggacaattgctctaacccttttaaaattgtaggtcgtttagcattaggatatttccatatccatttaaaaaattgcaaatcaaatctttcttcacatcccgcgcccatatctggtcttgttttattccggtattttacaattcttttaaacgcacgataaatacaaattgttctatgaatatcaaggaagataattgtatcagctgcattcagtctgatatccatcgtcccgccataattcccatcaataatccacttctcatctttaattaagttattttgaactgctatttgttcttctctcggaacaccttcccaattcggtttccaaaataatgcatcaagatgatgcaccttaatatttaatttatttcctaactgccttgctaatgtagattttcctgaaccaccagaaccaattaatattatttttttcatacctttacgatacattctataacttcttcaatagcttccttattagcaaaaatccagaagaacatttcttcatttaactttaataaatctggtaactggacaaaataagcaataaagataatttgaattgaaagcataacataccaaatagcttttagttcttctttcgttaaatcattttgtttataataaccttcaaagactttgcaaacgatatgtaaccatttccctcttaatctttcattactaaatagctcgcttaatacacttgtacagcaataacatagatcgaatatttttacattattttctaaaatctcaaaatctataaacccttccagtttatcatctttaaagattacatttgatagatgcatatcacgatgaataatttgtctcggtaatgaatggaccgtttccttgaaagctgcgtgcattcgctccatcttttgaattacctctcgatgaacatactcattcttttctaaaatcggtatagcccattcaaataccatcttatataaatctctttttattaactcatggtcactattcaccgcatgtaatgctttgtgcagattagctatttcttctccaattgtacttgctagcctttccagcttattcgtatcttttatttctaaaacacttccggcaacatactcatataagcaataatatttttctttatataatacatattgttcatcattttctgtctttactactctctgtactttaattcccttttcatacagttgcttcaaaacatcgaattcaactagaagttgctttatcgatcccgttctctttaaaatgtactctttattcttgcataaaaccttcgctacttttggttgcattacagtagctgtgacatgttcatttcgaaaccaaagctttgcaatttccagtgcttgttccatttacaaataccccttttacaattcttatttcttccgaaaaataacctcacacagtattcccactccaacaccaattgtataagccactacatcactccacaaaaaaccgtatcccaacacgagtccccccaaagtcgttgcacgaatgctatctatccattccgcatgatacaattggctcgcttcaatcccgtagcaaaacattaaactaataaaagccaacttcttcgtctctgttttaggaaacaaaaatccaaagccagtgaaaatcattaatgcccataatgcatcacctaaataatcatttaatagatgtggtagtgcaaaagcaaactttcttgagctaagacctaaaataataacaactatagtaaatagtgcatatactactctatttcgtttcatattcattttaaagtctcctaatatgtaatgtaaaactgtaaatagctagtaaaacaaagttattttactagctatttattgattgcttttatgataagaaaatgtggattcatatttaaataatgatatgatttttcgcttacttctttcattttttcaattgccttcggttccactatctcttctaatacaaaataatttgtagtttcatttagtatgtcttgtaatgatcttctaaaaaacttgacttcaatagtaatattcggtttaacccaagtatctattaataactgtttttcaaaataattttcacatggaaactttgtgaaatccataaaaggatgatgaatagaataaataagttctccacctggcttcaatacacgacgaaattcttgaaatacttgattccaattttctatataatgaagagttaatgaacttacaatcacatcatacgtattatcttcaaatggcaatgtttcttgcagatcatgacaaaggaacgtcgcttcttctcctatattttcttttgctgcttttaccatttcaggacttacatcaattgctgtaacatttgctcctcttcctatgaattgagaagtataccatccagctgcacatccagcatctaatatcttttttccttctagttcctttggaataagctccatcatcgccggtctttcataataactgttatatggatttgcgaaatctagattttctttatatgtactcgctaatttatcatacgtatctttaatcgaatctttcattacacacactcctaatacatattaacccattaactcctgctgctttttctttgaaaatgattgtagtactaaatcatacgaccaatcaatcattttattaatttgctcctgctctatacccttatgaatataaacggtattccaatgttttttattcatatgataccctggaataattgtttctggataatcttctcttattcttaatgcgacttctggatcacacttcaatgtaatcgcagccttttcaccttcttcatgatttactatcgcaaatattttattattaagcctcatacatgttgcactccagccatctggagaatcttctgtcgcttttcttttcgataaacagtacgctcttgttgcattcattttaattggcacctcttattctttccctgtttgattacgatgcatcacaatttgcttcgttgcttgaaattgctgctcaccgtaaaactttattagcttctctccgcaaaatagactaacaatatcaatatgagatatttctcgaagtaacattgtaagcattttctctccaatacctttatttcttacattctcatgtacgacaacatcttcaatgtatgctcgaaaaacaccatcagaaacgactctagcaaatccaactaattcattttcttcccatactccaatggctatactattctttaacattttttcaatatcgacttcttttctttctggccaccaaccgacagaatcataaagcttcttaattttttctgcacagattggttgttcttgttgcaatttatacgtgtacatatgctttctcccatcaatcagtatacataatattattataatctcttttcaaaaaagtgctgactatgaccttttggatgatcttcaacgataccatactctcggtaaccgtgctttttataaaattctggcgcttgaaaactaaatgaatctagcaatattaatctgcaccctttttccttcgcaatttcttcaattttatgtaacagttgactaccataaccgtcatgacgaactgatttatcaacccataaaaagtcgatatgaagatgataaaaatacatcgtacctgttacaccaccaaatatttttccttcttcattttttactacgaggcttactttttccatcggctgttttacttcatctgttaagatggacatattatattgaatgactttatttttaatgtattctccttcaatacgtgtaccgttctctatatgtttcatatacattgcttcctttcaacttagtaagctacattttatttttcccctttaaaatactaatcaaaacgaatccaccatatgtaacaaagcatgaaaagccaattatccctggtacagagacatagcctacccttatgtaatttataactgcaaaacaagcgatagacaataaaatagatggccaaaatataacagctatttttcttcgctctcgtttcgatgtactttctttctcttcagaaacacgtgtgccaaaaagcaatacaatacaaataaggatcgctgcaaagtaaattgtatctaatgacaaattgtgatcatatagggcgattccaacttcaagagcaataatcgttaaaattaaaataatgattgttaaagtctttaagtttcttttcaatcgctcactcctagcatgctttcactatattctttgtatatgtactttaaaactactgcaaaagcttcatctacctctttattttcacggcgattcggtaaatcttttcccccaatcacataaagaagtggaaattcgttaaacattcctattataccaatatttattgtagctgtgagtaatccacctgtcatatgagttatatgataatatggaatttcttcatactctccttgctgtcttaccatgccgctaataattggttcccataattctggttctgatttataaccttgaaaggtttgtatgaaaagggcaagaacttcacttaattctccaacatttttctcatctctagcattctcttgtatatgaatttttgaaaagtacgtttgtgcgtacattttcacagcatcccatccaccacagtgcattacaactgactgtgcaacgtaactatcatgacaagcaatcattacctctaccgcttgactaagtgttaaagaagttcttccttgtaaatgcggatataactgcgcactatcttcatgtggattaaatttaatgtaatgaagtatatcattccaattatgtttattttccttcaccatttgcgttactacaaatccaatgactaattttgctgctgatgctaacggaatatttaattcactattatacgaagcaactatacgattattttttgtagaataaattgccattcccacataattagattgtacctcttttattttatttataacagtttccatttctatccctctttttatatcgttatattaacttctaatatttcaacattgaatgtaaaaaaccttttcattagctattaaaataagaaaaaggtagcatgaattttttcttgctaccgaaaaatatttattcttctataggattttcaggaccgttaagttccagctgataaaaagctaaatctagccatttattaaacttataaccagctttttttattgttcctgcatgaacaaatccatagttttgatgcaaggcaatacttttctcattctctgcatcaattccagcaattaaggtcatatactctctttcctttgcaattttgattaattctttcattaatgaagacccaatgccattttttctatatgccttatctacatacacagaatgttcaactgaatatttataagcaggccacgctctaaatgggccgaatgtcgcaaatcctactactttattatctaattcatatacgataattggatactcttcagcctttttttgttcataccaatctattctattttcaagggttacaggtttatacgcatatacagctgttgtataaagtatcgcatcgttataaatatctaaaatgtatgctaaatcttttttcgttgcttcccttatcattattttcttcctttcatcatgttcaccttattttactatctttttaatagttttattttatcgaaatttccgatttttatctacatacgaatactagcttttcggaaaccatcaaatatatttattgcagcagataacatgtagaagaaaattcctcccccaatgagccacgttttaaactcctctgaggaaatagtaaatgcatttgccaaatacgtaataaaccctgcgttaaatacatgtggatttactacaattacaatgaatactatcgtcccagctatttgaagaatagcattcccaatcgccaatctttgcgtccattgtccctgcactaatttataaagggatatacatatttcaaaaacgatcataattacaacgattggccagtactgcaataaaacatcttgattaaaagttggcgagacaaacttcagtccatttgccgtaccgttatatacgccaacaagataattcgcataaaagtaaagtgtagcccaaactgctgtccacattaaacctccaaaaacttcaaacttcgagattgcttttttctttgggatatacgagatgtttttcaaatcatctggtgtccatttttttaaacttgtcgtcaacggctcgatacctttgtctttatctgttctttctaaaataacaaacacaactgtcaaccagaaaaatacatggaggctcacttcaaaaatttccccaatgcctttacctatcaattgtaaaataacatttaataccgcttgatcaccactatagcctataaaattttctgcaaccattgatatgagtgcaatgacagctgcgattggtataatcatttttaacaacgttgtatatacatcaaaataacgtggtccaattaaatgcatcggtctatccaaataaccattagccaatgaaaccggactccccaatttttcgagaacgctctttacatctttctcattataatcttcaggtaacatatcatctatagttgaccttagttcaagtgtaatatcttcacgatttttttcaggtaatctcttcgcaacctcttggatatagagatcaattaaattcattctcttcctcctcctttaataagttataaagttctttcgaatcctttatccattcttttttcaactgcaaaaatatttctaatccataatcacttaaaacataatacttacgaggtctactctccgttttatcccaactactcgtcactaattcctgcttttctaatcggcgaagtagtggatataaagtactttgatcaattgtaacccctgattgctctaataactggacaagtgaatatccgtactgcggcgttcttaattgacttaaaacagctaacgttaatgtccctcttcttaactcagtaattaacgaatttaataaattatccattcactcacctcatttccattactatatgtcatacagtatgtgttttatactatgtatcgtacagtattaatgtgacaaaaactataattttttaccaaaaaacagataatgaacagctcaaattatatgatttgtgcttttttagctaagttatatataacactctataaggtaacaaccttaactactaattttgaagttccagtaatgctatattaagttacaaatatcgtatacatatgatgtgaacataacatctcactataggaagctataaaaacggtgaattaccatgcttgaataattcccgttttcagcacctaatcaacgttatttccttcataaacttcatcttgttcaaaatctttatttttgtttggtttattagagaaaaataaaaaaacaattaaattaggttaattgtttttcaaatacaaaatctttatttttttaaataacctatgatattcgaaaagacaaattctccaaatgcaagtggtatataaataaaccataactttaatattgcctttgtttctttgtgatcagaatcccccattaaaaccaaccctatcctttttcttctaatattttcattttaattccaataacaaggaaattataccatttattaatgttttagtctattttttctgaaaattaaataaataaaattcttgtattccctcaatattcagataaacataataacttttttacgtttcatcttcaaagtcaataatgactcctgttagaaccgctacattaccaatcgattggatcccgtgaccaataaaatccaccttaaattcttcccactttaatttatgtaatgatataataacactaaattttcaacacgtgcttaatagattggggacttataatggataaacctctcactgcattacaaactattattatacatatgaatacaactgagcattggcatgattttatttgttactgtcagcatcgcgaagcgggacttcgaaaattagcttttaaacatttagagacatttattacaaatgcaaagaaatgggaatcaaaagatcaagaagagtttgccatttcgctgtttactattttagatgtattaaacgaaaaagatgaggtcttaactttctcactaaatagttttctaattgacattctatatagatggacagaaaacaacccatttgattcaagaccttttagatggataggaatttatatggactctagcaataaagaagacgatttagaaaaatcccttcgaaaagcgattgaattaggtggtgataccgaacaagaagccatgatatacctagtttctaattacatcaatactttagaatttggtacacatgaattcccttcaggttattgcggagatttaagtgaatgtatagaaaaacttccctatatgcttcaattaattgatagaattcagaataagaacataaaggagcaaaacattgggcaaatacaagaacaactacaccttattctagattggttaaaacatacacaaattccagtagatgccgttcgtgtacgggaaaaagaacaaactaaggaattagaaaaggtcattgtatattatttacacaacagctcaagtcgttaattcatcgtgtacagagataataaagttgtttaaaaaacgccagtcatgttattcaacaatcgggctatataacggaataaatccttgtaaaaattaaaaatatttgaaataatcgtcattaagttgaagtagagcgattgcagaaaaaggtgatacgactttttcttacttaataattgcatgatagttaaaaaattcaactaattatattccgaaagggtgtgtgtagtatcttatcaactaatgtttttacttataaatctaaggatggaaaaacaataataattagagaagctaaagaacgggatgcagaaagaatactagattctgcttcaaaagctttaataaacgctccatacatgctaagtacggttgaggatgtaaaaaaggtgcgtatcgatgctattcaaaaaacgttaaaagcttatcatgaaaatccaaattatgtacagtttattgctgaagttgatggtaagttagtcggtgcaatagattttaagaacggaaacaaagaaaaaattagtcatcaaggggcttttgcgatgaccatactacccgaatatcgaaattatggtattggaagagctcttctagaaacgttaatcaattgggctaaaaataacagtaagattgaaaaagtttgtcttgaggtaatggaagataatctaggtgcaatccaattatataagaatctaggcttctttgaagagggtagaaaagcaaagggtgtaaaattggatggtagctatcaagatttaatattaatggctttattcgtttaaaattgaacattaatttcaatataaaaagagggtcttcatagtcatctccctgttaagtagacagtaatagaaaccctctttttatatttatctcacattagcttgcagtaaaactccccactgattatagtttcactttattttaatcctttaattaaaggtgacgcttccccactatggaaaatccataggtcatgaagtgatctcgtacatccaacatatagtaactttgcatcatgttttgtgtctttgtaatgttcttcatccacatcaattaaaagcaccgcatcaaattctaaacctttcgctaaatagacaggtactactgatataccaccttcatatttactttggtttgcttcaattacgtttaccgttaatcctgcatttgttaattccacatatatatcacggcattcatcttctgttcttccgattaccgcaattgttttcacatctgcattttgcaaatgttttaccgtcttcacaatttcagtaaattgattttccgcatgaattactttcacatcttccccactgcggaagactggtgttgcgagtcctactgggatttctgcatttttaattatttcatttgcaaattcaataatttcttttgtagaacgataacttcttgtcaattcataataaccggtttcttggaatacttccttaaaagcattccaatcttcaattccttggtaatcataaatcgcttgcgataaatcacctaatatagtgaaagaattacctaatgtaatttcttttaatacataaacttggaaaggcgaaaaatcttgcgcttcatcaataacaacgtgatgaaacttctgcccgatttcaatccctgttatacgatgatgtatgtatattaaagctggtaaatcttctacatacacttcttttttacgacaactcttttctgtttctttaacaagttcttcaggtaatacctcgagtatttctttactttttactattgaactatacagtgaaagagcactcattttcggccaaaacttcatatatgcgttcagtctcttagtcgcttcttttttaagtaattttttctcgtttgtttccccgaattttttaagttcaatttcaatccagcgcttcattcgtcctactaatcgttctcttcttttctgtaaaggataatgtttatattcaacttgcatccattttttaatatcttctactggaataatcgctctatcccacgcctcaaaatcttttgtcggaactaactcattttcaaattggatcattctctcttcaataaacgtcttaaattccaacgtaccctttaatttacctagcattatcttcttttcatcacgattaattgaaaatgcttctttcaatttttcttctgtctgctttagtttcactgaatcatctaacgtacgtaatgcccaatccagaaacgttgtttgactaatattccctacacctaattcaggaagtacactcgaaatgtagtctaaaaacagactattcggcgcaaatacgatcattctttctgcttctagttgttcacgatattcataaattaaaaaagcaaggcgatgtaaagcaattgttgtctttccgctccctgcaaccccttgaataagtaatggtaaatttctttccgctcgaataatatcattttgttccgattgaatcgttgaaacaatatcctttagcttattatctttattctcacctaatcgatatagaagaaaatcatcggcatgcgatacatcttcatttccttttacatatgtatcaacaacacgttcaagttctctttttcgaatggaaatgtttcgttttaaatacacatcaccttctactaacccatctggtgattgataaaatgctaattcttctccaccggtaaatgaataaaacatactggcgacaggcgcccgccaatcaataatgattggcttcatcgtgtccatatccgaaacccctacttttccgatataaatcggcataacttcttcttttccatcttcctgaaaatctaaccttccaaagtacggctcttgcacaccaatacgtaagttttgtctattagactccctcatactttcaagaatttgctctttaaaatcttctccataataaaccggggttttttcaagcttatccaattgctcatccatcgtatgtaaagtatccttcattttttgtaactcatcttcaaatatgttgctcatttcgacgattccctcctgtccgttctaatttttcagtcgaagtatcattgtattaaaaacccaatcataaagtcaatagtttccgtttaaattttccgaaaaaacttacttttcatctttctaatttaaaaagaatatgcaacatcaaaatcacacaaatacacatatagtatagtgatgcatacaaaagatactactttctatttgtctcctatttaatttatccattaacaaatattgtaaaaattaaagactttaatcaatgggcgttttactgcccacaaataataggataaataaaagtaaaggaggctcttcaaatgaatattttgaatctatctcaagattaaatatgcttctatctggctgtatccttatgctttgttggtcaattatgtatgttgaaatatatagacttacaaaatcagtctggccatgtgttatcatgcatgcaatcgaggatgctgttcctactgttttagttacaataacagggattattactcttacaaacagtagtgatttttggttaaatcctactagcggggtcgctgctactgttttatttctcggaattggaatcgtactaagaactataagaataaaaagagaacgacaattattcacacaataaaaagcagataatgaattcgtcattatctgctttccaatttttaaaactaccttattatattttttgatacataagccagtcaccagagtctatcactttctttaacatctttttattctgagcgatatacacatatgcctcaatttccctatcagcaacatatactgtttgcgtgattcgatcatataaatcagtctccgcattacctgtatattcttctagttcatctaacttacacaatatcttatcatttactacataaacttctccatacacctgttcttcaatcgaataagtcatggccggatatccttcattcgtatcaaataattttccatatgtccaagctctgtctgcgatgcatgttgcaccttgcatataatgagcattcgtttgtcctcttcttaatgtgccataaacgaacacatgatacataaattcttatcccctttatatgtctctactttcttatttgtaaataagcacgaatcataaagtaactcacttcattcggaagctgttctttaatagatttcagcccaccctctgcattttgaacggcagtttcaataagagattcatactctgctggaacaaagctttgccaatctacttccattccatcctcatagcagcgaattaaatggttttcaattgtttgtcttgataagttacgttcttttgcaatctcattcaaatcaataccttgtttatacatttcatatgtttctaaatgagaatttgcggatgcttttcctgactttttacgctctgaaactacttctgtcttaatcgtttcagcataatttggattttcctcaataaaatgctgaactgcttgtaagaagtgcgagccatatttcacaagtttgtgttctccgataccttttaccgtcaacaattcagaatcattttgcggcattttcacacacatatcttttaatgtttggtcagagaaaataacgaacggaggtacaccttctccttgtgcaatttctttacgtacttcacgaagcacttcaaataaaggatggtcttgaacaatttgtcttgtctctactcgttcttttcgtaaaacattctctttaccaagtaatacttctttccctttttcagttacttttaacgtcggataagtgccatgttcaactgcaattaactcgtctgaaattaaaaactcaataaactcactgacctcttttacactacggttcgataaaagcccatacgttggtaaagtatgaaaattaaattcaataactttcttattcttcgacccagttaatacttgcgctatcatttgctttccaaagcgttggttcgttctaatcatgcatgataaaaccatttgtgattctcttgtcacatcgatgctctcgcgattgtctgtacaattaccacagcgtccacaatcttctttcggttcttctccaaagtattgcaaaatgaatgattgtaaacattgttctgtatgacagtaatcggtcatattttgcaatttttcaagttcatttgaaaaacgtgattctccagttgattgatcaattaaaaaacgctgtacttgtacatcttgagaagaatataacaatatacatgtactatctaatccgtcacgaccagcacgtcctgcttcttgatagtaactttccatattttttggaagctgataatgaattacgtaacgaatattcgatttatcaatacccatcccgaatgcagatgttgctaccattacacttacttcatctcgtaaaaagagttcttgttgctcatttcgatcactatcactcataccagcatgatattttgatacagaaacacctgccttcatcaaatcttcatataactgatcgactacttttctagtagctgcatatataatcccggattccttttgattttgacgaatataatccgccaaatatgcatttcgatcttgccctttaatgacagaaaacgataagttctcacgctcaaacgttgtcataattgtattttcttgattaatttcaagtgtgttacaaatatcatcacgtacttgcggtgttgctgttgctgttaatgctaatacgagcggcttttctggaagataatctaatatgcgatgtatatgtaaataacttggacggaaatcatgtccccactgtgaaatacagtgtgcttcatcaatcgcaatcatagggattttcatatcaataagttgatcaacaaactccatcgaatcaagacgctcaggcgccacataaagtaacttgtaatgtccttgtttcgctaattgaattcgctgatttgcttctgcaatagatatagaactattaatatatgtagctgaaatgccattctgtaccaatgtatctacttgatccttcataagtgatattagaggcgatataaccaacgtcgttccttcaaatactaatgccggaatttgataacaaatcgacttaccgccacccgttggcataatacaaaccgtatctttcccatctagtacatttttaattgtttcatcttgtcctcttcgaaacgaagaataaccaaagtaggacgctaaaagttcttgtgctttagtaaacaaaaaagagtcacccgcttttctttatctttcatctacttctattatatcaatcacttatgcgacttgaaagggatgattagatgcttattgttttttcattattctatgtttcttcacttatttaatatgaattagcatcattattttatatgttttacaacatttataacgtaaatccagtacacaagaagaaagagtttcaatttaaatgttcattttatttccctttcttgaatactactaatcgtatacatataaattcaggaggttactatatgaaacatcgtaatatgagttccatcaaggcaaaaacgaaaacacaaaaactccaattctctaataatgatgcgtggaaatatgaatcatactataagtaccagccattattctcttataaaaagctttttaattttctttctcaactttttagacgttaatatatgtgcaaaaaatatatcattcacagaatttttctcaatattaaatgtatagacttactacaattcagttgttaccatatataataatctgttggataaaccccttaagttgacctgcttatattagcaggtctttttcatgattacatacttctgtgtacctcgatctcacttccaagtcttttctccattttataaccatatttagatcccaacaattaatgataatcataaattgttgggatttaaattgttcacatataattatgcaattcttctttctcaatacacaaaacacattttacttgttactataaaagtactccagatgagttttttgctcatcgacattatctagttattggggcctgccgcgggaagcaggtccctttgactgtatgaaggtcccaatttcatttggacacatttaccaggttttttcaaaagaattttatgataacattacgtagtcgagtccgacatctcggcaatacccttttgagggtctgcaacttcccttacagaccctcttttactttatattcaatttattcatatataccacaacaccattcattgaatttctccatttcaaattccctaaaaataatctaggacacgtaactaaaaataaatcttcatcatactttgagttatacatgttcaaaggagtgttactatttatgtattcttattggcaatcgtattactccccctaccataacccttatgtaaactatgatttatccgtacggaactaccgaattagtaaaaatgagaattttttaaaagggtatatgcgttctttatgggaacaacacgtcgcttggacgagattggctattataagtatagtatttaatttaccagatgttaatgttactgttggacgacttctacaaaacgcaacacatatgggactatcacttgaaccattttacggtgaggatgcagtgaaaaaatatagtgcattaattaaagatcacttagtaattgcagcggatcttgttaaagccgcaaaagctggtaatcaaaatgcagcggccgctatagagaaaaaatggtacgctaatggtgacgcaattattgaattccttaacaggatcaacccatatatagataaagaagaatttagaaaaatgttttatgaacattcagcactaacgaaagcagaagcacttgccttcctaaataaagattatgaagcaggagtaaaactttacgataaaattgaaaaagaagcattagaaatggctgacatgataacaaacgcaatcgtaaaacaattcccgcaagtatttcaataaagtgaaactttaatcagtgagggggttgttcatcccccactgattatcagctctcaccaatcggcttatttagttttctctccatgatatttcacctctcctctttacatttagcttatatcgatatattttattaatatccgttttttataggaggaaatagtttgattaacgcgattggtctcgtttttatacttacaaataaacacgagaaaaaaaagaaagtttacttaaatgaaaaatttgcactaatagatattattgattctaaagaagtatttgatgatgaagggaatcctttagtagaactaacatgtaaatacagtatatatttagatgaaaaatattactgtaaatctctcgatgattataccggacaagtctttcctttcttaagtgcaaaaataggaaaaggtcttctaagaaacttaaactactacttttcttacgttgatgcctatgataagaaaccaccagttaaagaaataagaccacttatgaaacaagtaactaacagatagccaaaaataccaaaaaaagaaagcatctaactaatctgtaccctttgtaaaggacattttgaaaaaagttaggcaacatcaagaagttaaagaaaaaatctaagtctgaaataggacttaaatattaatatacgaggaggatatatgatgaaagctatcgttgtaacgtcgttcggtggtcctgaagtgatgaaatatacagatttggatataccggctatttcagaagatcaagttttaattcgcgttgttgctactagtgtaaatttcgctgatattaaattacgttatggtaaaaaaggaaataaagcactaccttttattccaggtatagatgccactggtattgtagaacgtgtcggttctcatgtgaaaaatattcaccctggacaacgtgtcattgcttttcctcaaaatggatcttacgcagaatacgttgttgcaaatgaaaatcttactttcgtattaccccatgaagttgactttcaaactgcagccgcttgtccaatcgtatcttttacaagctataatttactcgcaaatgttgcaaggcttcaacaaggtgaatctgtactcattcatgcggctgctggcggaattggcactactgctattcaacttgctaaactattagaggctggagctgattatgttatttgtcatcaagatgaagattttgtagagaaagtcaatgaactgacaaatggtgaaggggttgatgtaattttagactctatttctggaacggtttctgaaagaagtttaaactgccttgcttattacggtcgcctcgttcatttcggtaatgctagcggtgaaattggtaactttcaaacgaaagatttacatgcaagttgccgctctatactcggttttagctttggaaacacacgaaaaaagcgtcctgaactgctccaagaaactgcaaatgaagttttccgttatttgcgtgacggacgtttacaaattaaggctacgaaatcttttccacttcaaaatgcagggaaagcacatgaatgggtcgaaagtagaaaaagtacagggaaagtaatactaaccgtttagtcctcttcctgaaatgaatactggaaacagaggtggcattcatgggatcacgaattatgcatgttattatcgctagtggtattgctgagaaactatcaattcacgataagacttctttcttacttggagctgtagcccctgatgctgttcattcaaaaaaagaaaaaggaacctcacatttttatgccggtacaacgaagaactatacgagaagaatagattatgattcattttttcataaatatgaatcacatatagattccccatttattttaggctattatacccacctcattgccgatgataattggctaagtggattttttctaccttggctaaaaaatagaatagagaatgacgaaactatcgcacccctgtactataacgattttaaattgttaaatgcaaagttgcttcatcattacgatcaagaacaacagcttttctctcttctcaatcaagaggctcacattgtggatattgaagaggtttctagagaaaacgttttagcttttcgaaagtatctttttgaagatatgttgtatccaaagcaacatttgcatgaagacttacaagtatttacgtttgaccaaatcgttggctatattgagacagctattgaaaaaggagtattttttattaaacaactctctaatgaaaaatccacttcaaaaatttaatccccctcaaatatatttgagggggattttcacatagcaatattattattggttcttctccataaccgcaaaataattcccttcgctatcagcaaagttaaacactttaccagaagacatagttaccatttctccaacagtaacatttttatttgttaaatctgtatatagttgatcaagattttctgagaagaacattaaagacggtgtaccaagattcaattctgggctcattttcgaaataacttctttattatgtaatataatgctcgtttccgcaccgcttttcggagcgatttcaatccatctcattccttgcttattatcttcctctgcaactacatgaaaccctaccttctccgtccaaaaatttactgcctcatcttgattatttacatataacataatttgtcctactttatggatcattacatttccccctaatggtttttatattctatgtagctttctacaaatactatcgttattccttttgagttggtatgtacttctttgcaaaatttatcgactgactcatcccatccagttcatcaaaataatcatttctttcaatcatgttatatccgtcgaatccaattttatctaatactttgaagaatatatcgaaatctacttcaccattccctgctgcgacttctatatacttagttgaacgatcacttttcacttctttacaatctttaatatgagtttgtactatataatcttttaatagtaataaaccttctcccggattttcatttacatcacttattaaatttgctgggtcaaagttaacagctagtcctttcgagtttgcagtttctaaaaatcgttttaatactattgctttttcagatcccgtctcaatggcgaagaatcctccaaatctgaacgctaagtcccctatttcattacaaacacgtagcattttatcatagtactcactattttcatcatcagggattttcccaatatgggctgttactatgttagctcctaaccttaaccctttatcagtaatatatttaaaactctctattacacattcagcttcagttcctattattccattttctccgaagctaattgctaatgacgggacttgaatctcattaaaagataagttttcttttaatgtattccattgtatctttgagatgttagctaagttgaaagtcggattcatagcatataattgaatatattctaaatcccattcccttgctttttgtattccttcgtttacttcaatatattttgtattcaaaaacattcctaatttcctatccatatgtgtaccttctttttattatttcgcatcattttaatattcgacttttttatattatttcctcgtataaaccaaataaataaactacccttttttcgatactcccagtagaagcatatatatgataggcacattaaaaacactaatacaattcccattatcacttgtttacaaacaaaaaagacgtaactacaaatagttacgccttctccatcatttatctaggctttttcttcccagtaaatgctggtttctttttctttggtgctttcggtttcgtttctacgaatgatcctttgaacatttcttgcttcgtaaatacgatgcctagttttttcgcaaattgcagtaatttgcgctcttcttgtggagttacaagagatacgacagttccttctttacccatacgtccagtacgtcctgagcggtgaatgtattggtctactgtgtctggtaattctaagtgaattacatgtgttaaatcgtcaatgtcgataccgcgcgctgcaatatcagtagcaagtagaatttctaatttccctccgcggaaagcacgcattgtcgcttcacgctcttgtttacttgcttctgcatgaagagccgccgctttcattttacggaatttcaatttctcagtaatttcatctaaacggaatggatcgtttaagaaagcaactgcttttacatcgcccatatgcataattcttcttacgtaatcatttttttcgcgtcgctcacaaatgatatacgtatgctcaactaagctttttgattctgcacgtgttacacgtactaattgtggttccactgctaaatcacgtgccgcatcttctgccgcttttgtcattgtcgccgagaagaatactaattgacgatcgcgcatcgttgatttaattacatcttgcactgcgcccatcattttttgctttacaatttgatcaaactcatcaaatacaattgtttttacttcatgcatttttagctttttcatacgaattaattctaaaatacggcctggtgaaccgacaattactcttgggtgtttctttaatttttcaacttggcgcttaatatctgcaccaccaattaaagatgcacctgaaatttcagttcctgctgtaaacttttgaacctcttcatgaatttgcattacaagttcacgtgttggcgctaaaacaacaacttgtggctgttttacttcaggattaattttatgtaaaagtggtaataagtacgctaatgtttttcctgttccagttggagattcagctataacgtcttgtccttctaaaatagttggaatcgcttgtttttgaatttcagttaactctttaaaaccagccttctcccaagcttgttgtaaaaatggttgcatatcttttatcatttgtttttctcctttatctctatttttgaagaaaatgctgtattgttcgcaccgtttctatcatgtgtgaaataacagctattaaatcatcaacatggtcttctgtaatcgctttttgaaatagaacctctaccttattatgatatgaaatcgcttgcttattatattcgtatgaaactttctgcataatcattctttcttttccccatatagaacgcattaatgtttcaattccttcgcattttacttctggttgttctaacgggaataaaaatgctagcttcatttcacaacctggtgtaaactgaggcacttctagtatttcaccagacaagttctttgcatccacagataatgaaaatgttgcttctactaatggttcaaacggttctgttaattgaaatgagatatgatatatacgacttaatgaagcaagatccatcatatcttttcgatctgttacaagaatatctccatgtagatcaaaatcatacacagcaccttctacgattacttttaaattgtcaaaagcagttggatcaaacataatttcctccaaaaaacaggcgcctttcgatggaaaggcgccacttgatgtatatatagtttacagataaacgagatgaattacaaccttttagaataaacctactgcttttccatcttcatttacatccatttgaagtgctgctggttgttttggaagacctggcattgttaacattgtacctgttaacgcaacgataaagcctgcgccgatagatggttttaactcacgaattgtaacgataaagtcagatggacgacctaattttgttgcatcgtcagaaagagagtattgtgttttcgccatacaaactggtaggttactccaaccttctccttcatattgagctaattgcttacgtgctttcggagcaaattcaatatcttttgcgccatataccttttgagcaattgtacgaattttttcttctaagggtaattctaattcataaagtggtgcgtagttgttttcacctttttcgatttcttttagtactttttcagcaaggtcaactccgccttggccacccttctcccaaacttctgttaaggatactgcatagccacgctcattacaccactcttgtaagtatgtaacttctgcatctgtatctgtaatgaatttattaattgcaattacgaaaggcacaccgaagctttgaattgtttcaacatgcttctgtaagttttccataccttttgctaatgcatctacattttcttcttttaattgatcttttgcaacgccaccatgcattttaagcgcacgaatcgtcgcaacaataacaactgcttctggtttaatgccagctgcacgagctttaatatctaaaaacttctcagcgcctaaatcagcaccgaatccagcttctgtaataacataatcacctaattttgctgccattgttgtagcgataacactgttacaaccgtgagcgatattcgcaaatggtccgccatgaatgatagctggtgtattttctaacgtttgtactaagttcggctttaatgcgtcttttaataatagtgttaacgcaccttctacacctaaatctttaaccgttacaggttgatttgcaaagttataggcaactacgatgcgagataaacgtgcttttaagtcttgaatatctgttgcaaggcagaacacggccataatttcagatgctactgtaatgtcaaaaccgtcttcacgtggtacaccttgtacaggtccaccaagaccaattactacgttacgaagggcacgatcatttaagtcaacgcagcgtttccaaacgattttacgcgtatcaattccaagtgtgtttccttgttggatatgattatcaataaacgctgctaatgcgttattggcagttgtgatcgcatggatatctccagtaaagtgaaggttaatgtcttccattggtacgacttgtgaaaaaccgccacccgctgctccaccttttaatcccatcgtcggtccaagagatggttcacgaagtgcaattactgttttcttaccaattttgttaaaagcttgacctaaaccaactgttactgttgatttaccttctccagctggagttgggttaattgctgttactaaaacaactttaccgtctttcccatcttgtaagcgcttaaaaatatcaagagataacttacctttataatgcccgtatggctctaattcatcttctaaaatatttaaatcagctgcaatttcttgaatcttcttcatactcgcttcttgtgcgatttcaatatcggatttcactgttgtagtagttgtcatataccctagtccccctttaattggttctgatgatattgtatcagttttttgtattttctgcacttatttacctcctaaaaattctttcatttctttatacgttttttaacataaatacccataagaatgttaacgattgttgtaactctgtaggtagttgacctaacatcttctcatttactccgcgcttatatacgccgatgccatctacaactttaaaaccttgttctttcgctaactgttcaaattcccaaggcatcatcgtattacaaacaacgtcttttccgtacaagcgaggataactgttctctcgtggctttgctgtcggtcctaaaattgcaatacatgcatatccatctttctttaacacacgctttatttcatttaacgctcgtaatggctcttccgtccattctaaagaattaattgccataattgattcaaattgctcattttcaaatggtaatgcagaaagatctccttttataaaagataaattcggtccttctccgcgttccttacctttttgaatcatcacttccgataaatctactcccactgctttatagcctgcgcgacttaatttatatgtaccgtagccatcaccacaaccaacatcgagcacttgtgcttctttcttcacgtattgttcaaaaaacggaataattgtacttctgctaccactgtcccacatctcttgactattttgattccaaaactctgcgctactatcccatttcttctccgctgactcgtgccaattaaatttcgtcatacattcccctaccttcacgtattatcattcatttcattctacatcattttccaaaattcctgttttatcccgcttgcagtaagacacctacctcaaaattcaatggatgcggattagttaatgggagagaactgctcataaaaatccaattgttgctggctgataatcagtcctagtggaaaaaatcccacactttatcttcaataggagatggatatgttaacgatggaatgcgtattctccaatttttgctttacttgggtttaactcatactcatgctccttctcattttgaaagatactatagatacacccaattgaaagagagggatgtacatgcgaagaaagagaaatcatcattttaaaagtggtgaaaaaaacgaagagtatgctgctgaaatatcaccagctggcattccaattagacataagcggaaagaaattgcaaatgagatagaaggtacaaataccggcacaatggtaggctatgtcgctttatttctttcgttattctccattgctttttatccagttacgctcggctccctagcaattttagttggcctattagctgtcaatttcggagcaagaacacttggatatacagcaattggttttggtagtttttctgttttatttactttactttatccgcttgctttgtcagcgttttaaaaaaacacaccaagttatacttggtgtgttcattcatgatacaacataatatgaccgcatccacaacaatgtttcgctgtaatttcttgaaacactggataattttcttcatctcgatgctcaataaatactttttcaaatcgatacatgtttggtgcatatgcccaatcttgtttcgtacgtgcatataacgttgaggaaaaaaactcctcaccaccgcaaacgatacatgtgttcttcatcgctatccctcctatgcttgtcttacttcatctatatgaacataagcataaaaaaaagaccttctattactagaaagtcttctctgaaacaaaaagaaatgtaccaaacattcctactccgctatattcttttgaaacaccagcttctgttttaaatgtttgctttacagtcataaagaatacaccatttcgtgcatctgtactttcaaattgtagtttttcttttttaccatctacattttgcgtgcattcaaaactactctcattacaattcaacgcatacttatcctctacatacactttaaaatctgattctttcggacaagttataagtaatattgccacgagaataatacttataatacccacaattgtataatatttcttcatttgtactcctttcaaatgacaagaaaacttgacttcatacgccaagttttcttagtcaacaacccattgccactcttgttctttcttatcaaaaatgagccaacctgtttctgttgcttcctctttcaattcatcgatattatctaacacctcatccgtactttcatacgaaccaactacatataccggaatttcaagacctcttcttgactcaatcttccctgctagatctatgtaaagaccatcttccattagtggaatcagtcccatgatcaattcttttgaaattgctggaaaaatttttgatttttggaagaaagaaaaacgtttcttaccgaaagcaccgagtttatacggaatgactttacttaacattcctacaaaatcagcaattctacgataatacactttgttgtaccatccgtcatcatgtgaaaaataaacaaatcgatttttcaacagcggaaagaatgttcttgcaagtggttcttttttgtgagccaaatataataattctgcaatttctttcggctctaattcatctaaatcgcttgcatcatcaaaatctacccaacaaaattcatcaaattcatcaatctctgcttgaattaacttatgtatattttcttcctcaacatattcaaataaagtatgataatgaaaatccgtccattcaaagttgtgcttcaaaagcaacacttgatgaagcggtgaagggatgttactcgcaaactctttaaacgtaattcctgatgtaataaaacaatgacctcgacgattaccattaatatatatcatattctttacttggtcagatcctccagacaaagcacctagccaccttcgttttatatgtttcaattctatagcatattttaacatgaaaaattttagaaacatagaaaaaacttcaaaaactatttacaatttcatgtgttttattacatagtgattacaagaaaaaacgcctgctcataagcaggcgtttttaaaggatttcatcagggttttgaggatgatgatttccctctttcttttcttctttttggaacatcgattgaattttatcaattgtttgtggagctaattcaatcattttttctgctaaatgtgtcgcattttgtaaatgaagaatatttactccatctttattcaccacaagaaatgctactggtgtaatagaaacaccacccgcgctaccgccaccaaatgcagcgttaccgtttgctctttgtccatcattcgtttggaaatcagaacctcctgctccaaaaccgaacgctactttagaaaccgttaacaccacaccaccgtcagccgtttgaacaggctctccaacaatcgtatttacatcaaccatttcttttaaattttccattgctgctttcattaacccttgaattggatgatccaccgttcataacctcctttgtcatatctttcctagtttttccgaaagtttgtgaactaaacataaaatttaatattgatttcaaaaaacttaagttgtaatatttagaaaaataaaaaagaggtcgattcgttatgatgcgaaaattaacaaagaaagatcatgaacaagtattcgcttacctaaaagaagaagcagcccttaacttgtttattattggagatattgaagctttcagttatgacacagattttcaagaactatggggagtatttaaagagaatggaacattaaaatcaattttactccgattccacgattcatttataccatatagtaaagaagactttgttaccactgattttgaggcacttctttccgcatataagccacttaaactctctggtaagtcaactattgtagaaaagtttgaaactgctccaagtctacaattaggcgtcaaaaatgaaatgtatttttgtgaatgtctaaatgacaacaacttacctgacacgcctattcatgaaacgattaaacttgcgtcactcgatgatatagaacgaattatgaaattacgaagtgacattgctgaatttccgactactaatgaatcagagaaaatattaaggcaggctatcgaaacgaatacaggacgcacatactatattgaaaaagacggcgtgatcatcgcatccacctctacttccgctgaaaattcattatccgctatggtagttggtgtatgtacacacccgaattatcgtggaaatggctacgcttcactcatattacaaaaaatgattcaagactttacgaaagaaggccgaacactttgtttattttataacaatccagctgctggacgaatttataaacgactaggatttaaagacattgggatgtggacgatgtatcgataataaggggtactttataagcagaaatagttataacttaacaataaaagcagattatacacaatttcatactgttattatgaagataaagaagctacttgcggagcaatgactctaactaaaacatgttatgtattcaagctaaatttagatagataaacgccccaattgttgcatctactccaacaattggggcgtttatcctcaaattcttcccactatatttatgaaacatttattccacttatgtcgctattatctttccgtacaaatgcccttctaaatattactgcgtcttattatactttgctttaaaatcaatatattcctgtttcgcatcttggttattaccttggtgactatcaaaagatgtatgtatttgtgatatgtattttactaacttgccttcatcatttcttttcttataatttattacaatacttacttccaatatctgctttgaaccatttttagaatcaatatgcaatgcgattgatccaccatcatattcatcatattgtattttcaacttatcattaatgatactctgaaactctaattcagttagtttgtatccaacagtactaggctgatcaaacttttttatatcatccccgggcttcatctttagtttccctatcccttttaaacgatctacaattaagttcacatatgaaacatccagatttgattccggactttgtacctgtccatttttatacataatattggtacgataaacaacttcttctttattatctttgctgtctactgctgaagtaacctcttgtgttgtatttccatataaacttttatctttcgtattatatatcccttccgaagtttgatagattgtttttctatgctctccatcttccttttgctcatatgtactatatatacctctttgttccacatacgcatatccatcatcactcgcagacataacctttttcatgtcaccttcatccaaatctttgacaaatggctcatattctatctttttttcaaaaaaactacatgcttgtagtaggctgattgttattatgatagtaatcattttagaaaccttttttgtgttcatttcatcatcacactacccactctacattttcgatcagataaccttctaatcactttaatcaccttacataattaaattttcttttagaagttaaaatactctcctgtaaataattacttttctatcatcaaaacgtacaatacgcactttctttatgccttacgtttcgatttaccttttttatttttctttcgatatcttggagtctctcttttatgttgctcccacgttttattaaatgatggaaatttaaatctgcaatatgctaatagctgaaattcagctgcaccgattgctatcgtatacattaaaaaggtccctactacatacataaataaatcatcaaacccataatcgttatgaaaatatatcaaaataagaatagttactgcgtatagtgtagcccacttcatcatctttccttttgttttactaaagaaagaagcagacctctcatccatactaaacgcaccttcacttgccaatttaaatgtatctattgttgttacgatatgaaaaattactgctcctaaaagcaataaacccgcatacagtattgtaatccaatcaattgaattattagccattttagtaacagtcaaagcaataggagctattgttgccaattggaatgaacataataatacgacaagggtttgtagtttttgaaatttaaattgagctatcggaaatgaataaatgacgaaaagaattatttgtataatatataagaatacttctaacttaacaattcctatattaaagagaagcatgcagtaatcccacccggctgataaaacaatagaaaaaatggttattgaactaaatagtattcctccaaacataaatcctgtagccccctcaggacttaaacgatcattacatgtcatcctaaacttatctaaatcttcttcttttatattccacaccttgacatttcaccttctatacagtttaaataatttccatttacttcaattctatttcactcttatttacttttcgatttggattttgtatttcgctttcgaattctccctcgcattctctcattctcttcccatgacatattaaatgacttgaatttaaatctacagtacaccaatagttggaattctgccgctccaatggctactgtatacagtaaaacaatacctaccgcataaagaactaaaacatcaattccataaccattatgaaaatatatcaaaataaacaggattagcgcatatattgtagcccacttcatcacatctccttttcttttactaaaaaatgagatggatctttcatccttactaaacgcaccttcactcgcttgtttaaatgtatcaattgttgtcacaatatgaacgatagctgctcctacaaataataaccctacacaaattaaagtcattcggtcaattgaataatcagatatcccaggaagaactaacgctgtaaatgttattgtacctaattgaaatgcatataataatacaacgagcgtttggaacttttgaaatttataacgtgcttttggaaatgaatatagaattaaaaagatgaattgtaagctatataaaacaatttcagttttaacaattgttttatcaaaataagtatgataataatccaccccccccataaaaataaaaaacataaatactgaagtataaactatccctccaataaagaaaaccatagcaccctcaggacttaaacgatcattacatgtcatcctaaacttatctaaatcttcttcttttatattccacatcctggctcttcaccttctatacgtttcaattatttttcaaacactaaaattctattaatatattatttatttttcattttgaatttcttattttgttttcaaattctcccacgcattctctcattctctgcccatgacatattaaatgacttgaatttaaatctacagtacgccaatagttggaattctgccactccaattgcaaccgcatacattaaaacagttcctactccatacataacaaaaaaatcaattgaataatcattttgaaaatacatcaaaataagtagtattaatacatatattatagcccccttaatcatagctccttttgtcttactaaaaaaagaggtggatctttcaccactactaaacgcaccttcacttgcttgtttaaatgtatctagcgttgctacaatatgaataataactgcccctacaaatagtagccaagtatacatcctaccagttgaattgtcagccatttcagagacaatcgaaactacaaataatatcgttccaagctgaaacgcatataataatataacgagcgtttgtaacttttgaaatttaaaacatgctttcggaaatagatatataattaaaaatataatttgaatactaaataacacaatttcagttttaacaatagttctgtcaaaaaaaatattgtagtaattcaaatcccctacaaaaataataaacatacatattgaaatataaaatattgttccaaacataaaacccgcagcaccttcagaacttaaacgaccttgacatgtcattcgaaacttgtctaaatcttcttcttttatgttccacattcagtttttcaccttctatacagtttaaataattttcattcactaaaatcccattacattcttaacatttttaagtacataaatctttgtacaactaaattcacataatcttttaggtatattattaccatattacttaccataatcatctaatcagaatgccttttgatggttcaagtagtgttctttttcctcaaaagttccaaatattcttctttcaattaagtataaccgtcttcttgtcaccttcatccaatgcctttattagactctcatactctattttgatttaccaaaactatacgcgctcagtaaaacataactgttatcacaataactattttttactacccttttactcatatcttcacaacatttatcgttctcaaaattcaattaaaatatattatttttgatttatatactctttttcataatttacatattcttttttggaactttgattattatcttccctggtatgataatatgttgaaatctcttgattgcgttttataagcttatcttcttttttttcttcataatttaccgatattgttatttgtgttattctcatttgattttcttttgtattattaggcgtattaaattcaatcatcaatattgcagaatcaaatttatcatattttaaatttaacttatcattcatgatgtttttaaactgtaattcagttaaatcatagcttattatgctcggttcactagatctttttgtatcttcactcggtttcaatttactaagttcatttaatcctctaaacattaattttacatatgaaacattcatagcttgatcctgggctactgaacgggatttttcattttttaaatttgtactatagaccgtttcttttttgtaattttgattactaccaacgtttttatcattttttatatcagtaacaaccttttgagttgttttcccatataagtcgtcttctttcacattatatactccatgggttgtttgatatattatcctgctatgttcaccatcttctttttcttcataagtactgtcgctagtctcttctttcacatatgcatacccatcatcactcgcagacataaccgtcttcatatcaccttcatccaatgcctttactaatctctcatactctatttttgtttccccgaaactgcacgcgcttagtaaaaacgttacagtcattacaataactattttttcaactaaccttttactcataccataactacacctttccccttattttatacattacttgctattcgaatattgtttttcatacttctcatatcgggttttagaagctttatcgttatcttctttactatttaaatagattgctattttttgatcatgccttattaatcggccttctttattctttttttcatatcccattgtgatgcttattgtagtgaattccattggattttcttttgaatctttcgccgaactaaattccattaataatattgcttcatcaaatttatcgtagtccacctttaacttatcattaattatttcttgaaattccgattcggttaagtaatatgttaccttggatgactcactaaatctttttttatcttttttgggtcttaaactatctattccctttaatctattaaatataaatcgaacattcgaaacatccaaattttgatctggactttttgattgattatcttcatatttaatactagttctatatacaatctcttcttttttttgctcactatttaatgaactagcaatttcttgcaaagttgttccatagaactttttttctttaatattgtatactcctcctgttgtttgatatacaacgctaatgcgattatcattttccgcccaaaacgtgctatccctaacctcttctttcacataagcatacccatcatcactcgcagacataaccgtcttcatatcaccttcatccaatgcctttactaatctctcatactctatattcgtctccccaaaaccacatccacttaataaatttgctattattgacagaactatcatcatcttggctttcttctttaacttcatactgacaccccgttgatttctctaggcatttttaagttcattatgttcctttttggaaagtaatacatctcacctttacttactgatatttacttactcgtacagattatattgaagatgctttaatttttaatagcattgatttatatacaatcctcaattgcttatatattctattcgaattttcagaaaccaaaacttattttatttctttcgctttcttttcctccctctctttataacgctttaagaattcctgacgttccctttcatgctcctcccacgaaatataaaatgatggaaatttaaatctacaataggctaataattggaactctgctgcacctatggctactgtgtacattattaaagttcctcccgcatacaatccaaaaatcttcagtgtataatcattatgcacataaattaaaatgagaagagttaacacataaattagagcacacttaattgcaatcctctttgttttactaaaaaatgatgaggattcttctcccgtattaaatgcccctttacttgcctgtctaaaagtatcaatagtcgctaaaatatgtaatatgactgcacctaaaaataataacccaacatacattaatgtaatttgatcaattgaataatttgacattcccgggattatcaacattgtaaatgtaatagtacctagctgaaacgcatataacagtaccacaagtgtttgtagtttctgaaatttaaatggcatcttaggaaacagataaataattaaaaaaattacttgaagactataaagcactaactcaaggctaacaattattttatcaaagagagtcgggtaataactccaaccaaaccttattaaccctacaataagaaaaaacattattaatgaaataaaaaacatcgttccaaacataaaccctgtagcccagtcgggacttaagcggttcttacaagtacttttaaattcatttaaatcttcttcttttatattccacatataattacaccatcttttctaaaatcatgtaataactctatttttgtagacaaactgaaagtaaataaatgtttttagtatttcatattaaactagccttttttactttttttaacaaacacaaaatacagcgatagcattagtattaagcctattccacaaaccaatacacctccatattctttctggtataaaaaaataaacatagtaacaatatagctcggtattgacaaaataatgagccacttccccagaaactctgctattttatatagaattaaaaagataaacataatcccaacaataataggtgctattacaccttcaaaaaaacctttttctttttttacggctttagaatctttattcaagatcttacattcctccctttactagttaatttatgaataatgtattcattctatcttcaatataagtttacgagtatcatttacaactttcatttcagtttttgtttcgcttttgttctttctctcttattctttttctatttgctataaattcttggcgttccttttcatgttgttcccatgtaatattaaatgatggaaatttaaagcgacaatataccaataggacgaattctgctgatactacagcaaatgtatataatattattgtttgtgtcacataaattgccatttcatcaaatgcataattaaggtttaggaaaattaatataagcaaaactattacacaacttatcatcccaattaataaatataatttcatgttagtaaaaaacgagacagccggtcctttcaatttatatcctccatgctttgcttttctaaaaacatcgatcgttgctacaatgtgagtacacattgcacctaaaagtattaaaccaacataaaccagtgttttattatcacatggaaaatcaaagatttcttcaaccaccatagccataaatggtaatgttgctaactgaaaagaataaaatacggtcacaatggtttggagtttctgtaatttaaaagcgagctttttaggcatgaataacattaaaaaaatgaactccaaaacatacaattccacttcagtttgtacaactatcttctcaaaaggagttaaagaaatcttatcaccatttagcaaaagaattaaaaacataataagtatgggtatagaagtatatgcaaaaactcccccataaaagattcttatataatccggacttaatcgatttctattttcaatttcaaaaagacccatatcttcttctcttatattccacattcagttttttcaccttctatatagtttaaataattctcatacacttaaattctatttcacccttatttacttttcgttttgaattttttattttgttttcgagttctcccacgcattctctcattttcttcccaagtcatattaaatgatttaaatttgaatctacagtacaccaatagctggaattctgctgcaccaacggctactgtatatagtaaaacagtacctattacatatccaataaaagtatcaaacgtataatcattatgaaaataaatcaaaataagtaggattaatgcgtatattgaagccactttcatcatagtctcttttgttttactaaaaaaggaagaggatctttcattcatactaaatgcaccttcacttgcctgtttaaacgtatcaatcgttgtcacaatatgaacaatcactgctcctaaaaataagaaacctacatatactaatgtaattccgtcgattgtataatcagacattccaggaagaatcagagctgtgaataatattgtacctaattgaaatgcatataataatacgacaatcgtttggaactcttgaaatttaaatcgagcttttggaaatgaatatagaattaaaaaaattatttgcaagctatatagcacaagttcaattttaacaattgttttctcaaataaactagtatagtagtcccaaccaaaggttactaaagtaccaataagaaaaaacatcataactgaaacgtacactattgttcctatcataaaacctaaagcaccctcaggacttaaacggctgctacatgttactcgaaatccatctaaatcttcttcttttatgttccacattcagtttttcaccttctatacagtttaaataattttcattcactaaaatcccattacattcctaatttttcaagtacattcatctttgtgtaactaaatttagataatcttttatgtatatcatcactacattaattaccgtacataatcagaatgcttttgatagttcaaatagccttctttctcctcaaaagctctaaatattcttctctctttcacttaagcatattcctcatactctatttttgtttcccccgaaactgcactcacttagtaaaaacgttactgtcatcacaattgtatcgagataatatagctttaattttatcttcagaaaggtgataacctcccatcaacaatatgctaggaggttattacagttatttaaaatttgttttttattttaatggattcgatttttgcaaataataatgttatttaatttgagagaagcgaatactaaaaacatactgcttaataactcgtaattaagtcttcaccctcatatctagggtctttctcaactttaccatcttttgttttgatgacttttagtctacctaaccactctgctccgttatatgtctcttcacttacccatacattatgctttttaccatctacctcaactactagtgtggggtgtgtaaatataaattcctcctctacgtgcctacctacaatttctgcatttaacgatgtaccttcttcaactagtttactattttgatacccttcgataataggtaatccaataaatacaaagaatatgagtccaaatacgattactttcttctttgtactccatttattcttttctttcaattccttctgtctcgcttctctttcttcgcgttcatccaaactctcatttaaagcatcttcccatgccttaatttccgcttcgatttctgcttcagctcttgctagtttttctaattgttcatcggttgctaccatctcatatgacttatctccaaccaaacgaatttcagcaccattttcttttacttttcgcaagtctttttctgtacaattaaactctcgaatgatttccccttgtgtgtttaccagtctaacgtaaatgctttttttctccttcttcttaaacatctgaactcccccttatttgtttcctatcatagataaccctattgcaattaagataaagaaaacgataataaggaaagtcttccctttgcttacttgtgttgtagaaccttccaagacagcccatataaaatttggaaaagaagaatacctaggagaatataaaccaacttgttgctactcttctttagtggttattcttctactatcggttttatctgaactgcttcttttcttatttgtttcggtttctttttcttgcgtctatgattcattcaactgactccttttagaataactttttcctaactataaaaataccgaaatatcccattttcatcatataggataaaatgatttatttcttcacaaatagatttccaccataaaaaacagtctatgactattatttacaaatgttatttcaacttttattttattctttttctattcgctataaattcttgacgttctttttcatgttgttcccacgtaatactagatatttagattcttattcaatcaaaaatagactttcctctttccatgttggaagaggaaagtctatttatttctaaatatattatagcccttgttttattaataattgttacttattattttcagccttgttctttatcgtttttacaaattcatttcgccatattttaaaattatgagcaaattttccttcaatagaatttttatacccttcaaatttcacttctaaaatatcaaagtcattgaataatttatatgtctctgccgtcaaacctactgggtgtaataccccaccataatcatagaaagtgtcttcatcgagaagtattcctcttgtagtaattacatactctacatctttttcttcctcagtactcaacctcactacacttcctaaaggcaaaactttctccatataatctttcatattaattcaccgatccttttaatacgataattttctcttctattttttgtcgccttttttctaattggcggatacgatcaataaaagcatcacgtgttttaccttgcaaactattatcaatactactttctaatcttctaatatctcctgtcaaagatacagctgctttttcaagttgcataacaacgttaataatttgatctcgcccaccactgtccggaaatgtactatgaaccctcgacattatcatatgtaaatccatcctcatacccccttccttaacatttatcaataataagaaaccgaagctaactcttcatcttttgctatcatagaaattaccgcatctgttacatcttgacttaactcttttaaatcatttgaaagttcgttcacatctctggaaatctctactaataatgaacgatttaatcctctactaccatcattcataaaatagtttaataatgattggcgatggcttcttacataatctccagcaattgaagcaatatttgtatcaatttcaaagtcacctttaaatacatctaaaatatcttgaacaagagaagatgctacttcttttgcaattgctataatttcatcacgggataaataaagaatgatgcatcctactaaaaaatctacagctgcgttaaatactgattctaacacttcaagtaccttttccttacattttgctaatttattctctatccaatccacagccgcattcacctgatttctaacttcttgtataacttccttactaaatttcaaagctttttttcctgtttctacacctatacttgctatttttgttgctagagcactagtatctcccactactgttattgcaactagaattgcactgactggggttccatttaccactaaatccactacaacttcttctgttgtacttaatgttttttttccagtgattcctttatataggtccccagcagattctgatatttctaaaaaaccaaatttccaatcaaatcctgtttcgctaacctttttcaatttatctattgctacattcccattcctagaataaaattttggatcatataaaaaagaatgcccttccccattttccattttataaacctgtccaggtattacaaaatctgcggccttaatggcgccatacaaaggatcatattcatttataagactgcggcaatttttcatattggtcccgtatccgtacttaaccacatctttatttaaaacaggcgcaggatttaaagctaatacgtttatattatcttcttgatgtcttaatgcaactgtattcgctgctccgccacctaaggagtgccctagtaaagttatcttctttcctttattcttcgccttgactttttcataaaatttttctgcttgactatactgaaattccgctaatgaccccaatataggtgaattagttaaattatgtagcccaattgctccatcggttgctaaatcacctatttggctcggttgggttccaacgtatacaatgaaaatttcatgcgtgtttctatcctctaaagcatatgccccaaatccagttactgaatgaatatcatcagaagctataagattagcattaaagttgtcttgtaacttctgtttatttattattggatcagaattattatattttttttcttgtgcattataatcataaatatcttttgccgataatcttaattttcctacatcactacttaatttataatcttcctcattcaccatattctcccccttatatattaatggctttctttaaatttcttttcatattgtaagtaatctttttttgatttccgattattttcttctttattatgtaaatatgttgttatttcttgatcatgcctaatcatattattttcttcatttctttgtttatagcctatcgaaattgttatctctgttatttccatcggattttcctttgtatccttagcagaattaaattcaattagtagtgttgcataactaaacttctcatactctaatcctaaattcccattaaatatctctttaaattgaatttctgataaattatagcttatcgtagctggttggctgaagctttttttattcacatttggtttcaattcttttattccttgcactctattaagcattaattttatattagacatatctttccctcgatttgaagcttctagctgtccattttcgtatcttatatctgacttgaatacaacttcttctttatattgtgggttgtcactatgtttttcatcctcaactggagtattgactttcttttgtgcctcaccaaaaagaatattatctttaatactataaataccttgcgttgtttgataaactactcctatttgcttattattatcctcaataaaagtgctatccctaacctcttctttcacataagcatacccatcatcacttgcagacataacagtcttcatgtccccttcatccaatgcctttactaatctctcatactctatctttgtctccccaaaaccacatccacttaataaacttgccactattgacacgactatcatcaccttagctttcttctttaatttcatactgtcacctcgttagttactctaggcatttttagtttcattatgttccctttttgatagtaatacacttcatctttacctaatggcgcttcgttgcttatatattttatgttgaagatactttgatcatttaatggcattgcgataattgctgctgttagcttacttctcattttcataggtagagcttcacgatttcggtccatgtagtcgtggtgacctgctaatacaaagtaaatgcctactgtacgagatagatcaattaaagttgctgcatcctccatttctaaataaacaaatttactaaactcttcaacatttgtcatgataatgagttgttttgtgaatgcaggaatttctctaccttcttgtcttgcttgcgctaattcaagagctcgttcgcgaattacttccatccaatacttcgcatgcatattgatttcattttcgtctacaatgtagtgcgtcacattatctttatattgaacgaaactatactctgctgtatccactaacgtcacactttcaaaataatctttattcaattgagataggatgctagatacaatttgttttctcatactatcatctacactataaatcattaaatgatcattccctgcaatatcatgagctacaacttctacgtttgcaaaatcaagccccattggaattcttgctgcttgtagggcttttgtaacctctttatttttacgataagtagcaatatcaataatttctggcatcattggaattgccttcggacgttctccatcccattctcggtccatatcatttgcttcttgttgtaataattgaatttgctgtaattcatcttctgctttcgtaggtaatgcaacctggaataatgtaggagattctagttttattaacgctcttcctgctgtttcttccacttttatatcagatctccctacaatactagctacttcactttgatcaatcatatatagacaagtttgaattttaatattattgtacaattgaattctaagtgcattttgtcgccctgcactaattaaggtatgaattcctaaacttgcaccatctcggacaatttgcataattagcatttcaaagctttcatagaacttcgcttcttttactgcatcataattgtcgatcgcaataataatatgtggtatttctttcccacttgccttttcatacatttcaatatttgcaacgtcatattcacttaataatcgtttacgatttttcatttcttgagttaatctttcaacaaactttaaacatttttcagattcatcaatcgtaatcgtatccgctacatgaggtaatccttttaaaggtagaagaccatttgttccaaggtccactaaatacacatgcaaatgctccggactatgctggcgagctacatccataatgactgattgtaagaatgttgattttccgtagcctggacttgagaagaccgctacgtgtccgtctttactaatatctaatgttaatggtgtttgtgattgtaattcaggctgatctagtagaccaactgttgcttgtaatggtttcttttctttcgtccatgcttctttgaactgaatagcgtgtaagtcttgtaaatatacgctttctggaagtggtggtaaccacggtctagctaacgcttcaatttcatttatttctgcgtaatcgtgaatgtagtcaataacagcatccagttcagatggtacgcttattacttctttactgctaccaagtccacttaagtcttcacttaatatttcatattgtcctagatcatttattgcatagattgttgcgtctaaatgttctttatcctctttgttttctacatagtctgctccgctccaagctgattggaatagttcataaatttcattattcccaacttgtaagtaagcacgtcctggtaatgtaatttcagcagcatctggtgtttttaaaatttcattactatctgatgtattttgcacttttaatgctagtttgaatttcgagttactccaaatttgatcatctacaacaccactcggtttttgcgtagctaatattaaatggattccgagcgaacgaccgatacgcgctgttgaaactaactctttcataaattctggttgttctgacttcagttccgcgaattcatcactaattaaaaatagatgcggcatcggttcacttactaagccttctttatacagtttttgatactgattaatatggtttacatcattttccccaaataagcgttgtcttttttgcaattcagctttaattgatgcgagcgctctcatactttgtgctccatctaagttcgtaattgttcctaataaatgcggtaagtttttgaataaattcgccattccgccgcctttatagtcaattagtaaaaaggctacttcgtacgggtggaaattgactgctagagataaaatatacgattgtataatttccgatttacctgaaccggttgtacctgctattaatccgtgtggtccgtgtgctttttcgtgtaagtttaagtttacgatatcttctttaccacgtaatccaagtggtacagctaaagatttatgcgctgcatttttctcccaacgacttgtgatattcagttcttttactttttcaacgccgtacatttctaaaaatgttacgctttctggaatactattttttaagttttgcaaatgatttaatggtgctaatgcccgtgaaatatcttctaaattgaaccctttcggtacgtgatttagtttaaattgacggttaacaagctctccttgctctaagatgatgttcccttgttttgcatctcttatatctattaccgttttcacatgctccggtaaactttgcataacatcttgtacaaatacaagtgatacacctaattgactcggatcatcattaaagaattccataacaacatggtctaatattagtttttcatctgtaatgagaacgacatagtgcggtgcaaagtacattttttcattagtagaacttttttcatctagttttaattttcgttctttcaatatttgatacaaactatttaacacttgatcacggctacgatcatggtatacaaatccacgtacatttatatcgcgaacacttccatgaggtaaccagcgcatccaatcccatttttctttttcttcttccggaaaaatagtaataaactgcaagtcataataactatggaataaagccgtttgtgcaactaataattgtaattgctctaacactaaagagcgttggccaatataaccgactggtccattcattaaatctgttacaactggtacatcttccaatgatagataacgctgtcttagttcacgtgctatatcgattaattcatctttcgtttgactaaattcttcttcattaaattgaatttcaaaactcgtattagcttgtcctgttccaacgctaaatgttaagaaatcatgatgtaacattgttttttcataaattctaggatttacttgaactgccatattacgtattacttctacatttggattgtgataatgtaatgcgtgacgctgtttttcactttctgcatgtaaatctttcgttttttgttttatatactctctatagcttttatctcgttcaacaatgtcgactttatattgcttcaaatttttaatatacgatgtgacagaaacaatgattgttactaatgtcatcgcaatcgatgcgataataaacattccatatttcatgaaaatagcaagtaatacagttacgacaatcatgacaagtgaaggtgcaatgattcttgctaaatgctccgttggttttgatggcatacttgaaggctttgcaattgtcattttctcttctggttcacggtaaataatacgtggtgaacgatgatagtctggataaccactttgataattcgtttctgattctactaaaataggtaacgcagatttcactttatcttctgaagaaagtacttgaatgtcttcactaccaatctccaataaaataccatcaaaatataatacgtctcctgattccaacataacgctatcttttaacttcgtataattatgaaatacatccccgccatacacgttcactttaaaagaatcgtacaacgtttcgcgagatagcattaaatctacactagtcccggtaatagaaatatcatcgtaatcgttttgactcactgtaagagaatgtttcgttccaatatcaaacactttagttgtgccaacaatagatataaagattttcaagctcacatctcttgttttcccaatctcaatttccttattgaattctattaattgatcctgtaccatccaagcatttacttcattattccactttaactctacttcttgttctaaacttggattcgtaatatcatttgtccactcttttccaatcgacactattgattgctcatttggatgtaatgtgcacttatatattttgtctccataagtcaatactaatagttgctccatccgtgttcactgctccttttcaactgtctcatcaagtgcttactcttttttctctgtgtccgacaaatttttatcgtttgatgaattgccatatttctttttatattcatctaattgttgctcatatgtttttaacttttgatcacgttcttcccctgataaatccggattatttttcagtgattcaatttgtttaacaaggccgtacataataagctgaggatcatcaagtgtcttagctaaatctaatgatttatcaaaattaccttttccgttatacatccaatacagcaaatacttttcatcacttttcaaactaatgtttttcataatcgatttcttttgagcttcacctagtttttcagctgtaatgtatgcaaatgctaactcatatttagatgcaatcggtaatgattcaaactcctcttcattcaattgcgtaatgactttgtcataatcagttgctatgaaacttgcatttgcttctaacaatttattttgataaggaaattttataaaagtgaaatatattaaaggagcagctaaaataactgtcgccgctatgaaggaaaaagctaagtatttaaatgatttatagctttttttaggtactaactgcatatttttttctgtttttgtttgttccttctcaaagctgtcatcaagaaactgcagtaatgcatctaagctttccatttgagcaacggtctgttcaaatgttgtttcttttgcatcttttagtaacccagcatacaaatcatcaaagttatgtttttgggagaataaagcaataattagacacttatattgtgttaaaaattgctcttctaataatggggttggcggaacaatatctcgaattcctctatgtataatacttggtattaaattagcattaaaaactatattgtctggatgtaaaaagaacgtgattcgtttatttaaatatttacgaaactgcgcaacattccgaagtagtcttaatttctcatttcttccaaaacggctaagatcgtcccacttatataattttttatctacttgatatagaaacgtaaacatatcatccgtttcttctattgttaatagtacaaattcagatgattcgcccgtaattatatcgaattgacggaagtcttttatacgtgtttgagatttggtcatctccaatttccaattttctttttctatttgaaattgatagttcattgcatcaatttgaattattttttccgtcatgtttatcctcttctccttttctttataacccgtaataacttattttcaaataactaaaagtaaaaaatattctttataaaacttgcaaaatatctccatctgttatttggtgatcaattaaacgatcattatctgttaaaacaattgacttatttttcactttaattacaaaatgtgaaccttcatgattatcaatctttagcgtatctaataagttttttaataaatatttaatagattgatgattcggaatacgcaaatcatatgtatttccattccatttactaaaatctactgtcacattgatatgtgtttgtattgccatcactttacctccaacttttacgaagaaccgtataaataccgatgcaaataagtagaatgccgccgccaaataataatattattgttatactaattggctcttcattcattgtttcattactcgctacttcatctgcactttttctgacaatgtattcactgctaaataaactatttttcgtatctttaacactattattctcttttggttttgtaaaaagagaatctcgcaaagcttccatatctttttgttctttctttttctttttctcaatttcttcctctatatctttgttaaataactcaatcgatgctttatctaattctgtttccttatgttcctttttatttttttcttggtcgctttcttcaagtcgatccactttaaacttaatcttcccatcatcaccaagataactgtcagccgcgctccttatcggtagcgcgacaaacagtaaaaggatagagagaaatgataacttagccactatgctccattgtttgatcatttacttctttttcctcccatttcttatgccatacaaatagattactaaccaatccaataatggcaattacaaacaatacgacaaaaataactttcccagtatctttaccactaataaaatcatttagaaaactttctatatactgaagcggtgagaattgacgtatctttccgacagacgacatttgatctactttacttccaactgcctcagttaaaaataggtacatgcttaaaaatactaatagtataaacattcctaccatttttatttgtcgtaataagtaggttgagaccaatacaaacgccatcataataaatgtgatgaacgcaatccatagtaaactttgatcctgaccgaactttaaaagacgcccagaaatgatacctatactaatcccttccacaattgatataccgaaagctactactgtagttggtacattcatatcaattaatgagaatttctcttcaaaatgatctgattgcattcgtttcttttcttgattcgcaattgcgtatgctgtaaataatgcaacaatgaaacaagttaatacaattaagtacggtgtaaaagcattacctgctgcaattactccatcattttgcttttgaactggactagctaaaaagtcatatagcatctcattttgacgatctccaatacggctattcgctaaaattttcgtaaagtttttggagaatgatttatcatcttccattttcttcgtaaagtcatttaataatagatcagcttttgaaacaattgtcgttccgctgtcttgaatttcttttgcttgtccattaatttgatcaaatgttttatatacatcgtctgaagttgctaaactatgcttcgaactttcgaccaatgactgactttgcatcattaatgatttaataccagaatctaacgataaaatagctgtttgctcaccagcatgatttgttgttaatacttgctgctcttcaactagctttaagctattctcacgccatttcgctaaaccttttacatactctcctaaattttcattcatactagttgcttgttgcgtcgttccatttaatttctccgctagtagcatagaattttgatccgcactagtaatagattgttgataagagtttatttttttgttttaaacctgacatatcttgctttatttctgtagtaatacttgatgaaacaagatttgaaattaaatcaattaaactttgtttatttaatacgtagtacaaagattgatccgtcgcaattgcatctaaacttccctcttctaacttaggacctacatctttcgttcttaaatcaatcccataatacatttcgtaaaggctcattaaaccttgataactttcgactgtatctactgcttcttttattaatacactagatatattttttgttaatacttctgctttttgatgtactacttgattcgttgtactttcagtaactttaccgttatctgttcccgtttcgcctcctggatttcctccggttccgttgtctgttcccgttccgcctcctgggtttcctccggttccgttatctttccccgttccgcctcctgggtttcctccggttccgttgtctgttcccgttccgcctccatttcaattaatggaaaaccgtagagtttctatccttaagttgatgggcatggggccatcatatcacttgtgaatatgtcgtctcttgttcacattttcctttttatgatgcaaatagctttttctttacgcgaatgtacgcagaacgctcctacgctcttgcaataaaagcaaaaacggattatccaggtggcatgtatttaagtattgatgatccaaagcgctccttacgctatataacaaacaatggagaaaaattaattttgattggcggagagagtcataaaacaggacaaggaataaatacgatgcttcattatgaagcactttattcttttgctgaagcaacttttggaatagacgaagttccttatagatggtcagcacaagatttaatcactctagataagcttccttatatcggacatattaacgaaagaaatccaaatatatttgttgcaactggatatcgcaaatggggcatgacaactggaactgctgccgctcacctactgaaggactccatcctaaaagtccacagtccctataaagaactgtatgcaccatcacgcttccatgcaaatccagatataaaaacgttcctctcccagaacattgatgttgcgaaacatttaattgaaggaaagattgaaaccgcattacgtaagccagaagatctcgaagttggtgaaggatctgtcgtacatgttaacggtaaacgagcaggtgcttataaggacaaagaaggaaaattacatatcgtcgatacaacttgtacacatctcggctgtgaagttgaatggaataatggtgattgtacttgggattgtccttgccatggttctcgtttttcaattgagggagacgttcttgaaggcccagcagatcaaccgttaaaacgcgttgataatgagtaaacaaataaagaagttcaacagaattacggttgaacttctttatttgttataaaacctgttcagataaatttcgacacaggaaggaaaatattaacattaaataaaataatatattcatctacaaattaaaaggggtgaatattatgcaacctttagctccacctcatctagaatctacagaaactatcttttcaagctctattacaaaacttgttgtttttatttgttggctagccattttagctgatggatatgatttaggtatttacggtgccgttctaccaaagctcctagaagacaaaagctgggcgctatcaccagcgcacgctggtacaattgcaagctatgctttatttgggatgtttattggggctattctagttggaacgattacagatctaattgggcgtaaatggacgcttatatgctgtttagcacttttttctatcacaatgggtttagcggctatcgcttcttctcctgagttatttggattatctcgatttataggaggaatcggattaggcggtgttatcccaacggcttcagcacttactgttgaatattcaccaaaaaaaaggcaatcttttatttatgctcttatgtttactggctatcctttaggtatcgtattaggtgctattttgtctatgtttatgttagaagatttcggatggagaattatgtttggtatcggaatgattccactactcctcattcctttcattattcgctatttacctgagtccattcaatttttattatcacgtaatcgccaagaagaagtgaaccaaattcttaatcgttttcaaattgaatttcatgtaaaaaataaaactcatcaagctccatctactatacgaaagaaaaatggattttttactttattctcaaaagaatacataaaagcaacactacttttttggatcacttatataatgggaatgtttttaatatacggtttaaatacttggttaccacagatgatgcgccaggcgggatatcctcttggatctagtctgtcttttctacttatgctaaatattaccgcagctgttggtgcgttattcgctggagcaattgctgatcgtataggcgcaaaaattgttattagcatctcttatcttatggcagccatatgtatcggactattaacaatcaagccatctgttacaatcatttatcttttaattggccttgctggtattggatcggtcggtattactcaaatattaaatgcatatgtaacacaatacttcccatcacatatccgagctacctccttaggctggggactgggacttggccgagttggtgcaattgctggccctattctcgtcggtattattatgacaatacaatatgacttagcatggaatttttacttattctcctttgcaggtcttatcgcagctatatctgttttcttcattcctacaaaataaaaagagcacaaacttacttgtgctctttttcatatgcttcaaacagcatgtctcgaaatagtgtatttaaaatttcaatatcgatccctgatcccttttcaattccttttacatattgcccatagtaatgaatttgttcttctaaaaattgatttagcaccttaattttcaatccaacatctaattcagtacctgcttttttctttattaacaacttttcaatctcatctaatacactacgttctaatggtaattctgtaatcaatcgatcaaattctacaggtggtaaagttgctttctcttctagccacttacaagctaaaataggacgtaatacataaaagtactttttcagctttacattctcaccttgcaaaaattcacgataatttttcgacgccatatgtaaataatgatatatcgttgcttttggatcaaaattcttctcactcatctgttgaagtagttctggaaaattagagtttttcgaataaaaaattggtgatcgaatccactcaagtaaagctgggttcgacttcgcgaatagttgcaacgcctttttaatatcccaaccacttatatctaaatcatcactaattggatattcaattacatctcgtttgtcatgaattgataaataccattctaccggatgtatataaacaaacctaacatcataatcgctatctttcgatggaaacccccaagcacgactccctgattccaccgcaaacaaaattttcacatcattctctttttcaattctttctaactccaactcgattttctctctcatttcataacatctccattttttgattatttccttggaaattcgacaatacactattaattttactacatactaaaaaaactgtcagaaattactgacagcctaataaaacttctattgttgcttttcaattacagtagcagcaattcgttcaaactctttttgaatctcctctttatatgcatctactattgaaaaatccatagcagcaatataaattcgttctaatttatcacgaaccgattttgctttcgctaagaaagacattgcctcattcatttttgctttatactgaatggaaacatcacgaatttccttcgcatatttctcatcagtccctggcgtaacaataagggcatacatatcaataatttcatcaccctcacgacttggaaaatattcatgcggtgcggtgctatcaaaaattgcaaagcctaattctcttacgataaccatatcaagactattcgggtcaaatccgcaatgatatacttcaacttcaaaccctttttcttcagctgccttagctaactttttaagcatcgttgattttccagaacctgggcgcccttttataaaataacgatgtggtaacccttctgttaaattaggaacaaaatcaactgctcctttcggtgtagcagctcctaaaaaacgatgttttacaagcgattttctcccgcttttatctgcaaataatttctggattagctgatcggttagttcatttgctttattaaaatctatattatcaatatatatcttctcccactcatcatgtataagcaatgcctctttaaaacgtgcgtaagcagactgaaaagctttacttgcttctgaaacaaatctttcaatttctaacttctgcttccttaatttatctgagtcccaagcaattcctaaatttatatactcttcaacaactcctggcattttgggctcaattacatgtggtgatgtcccatcaacaattcctacttttaattttgggataattacaccatcaaccgatttattgtcagaagaacaatgtaaaaattcaatatcatatcctttttcaacccattcacgaccgatggcctttattaaagaagatttccccgttcctggaccaccctttaagataaataatctgtctaacccttttaaattctcttcatataaattatgaaatcccctagctgtattaccaccagcataataattcaatacatttcctgtcactgcactcactccttcgcagcattgtatttacataagctacaatatgcgcgtagctttatttgggtgaatacctattttgtattgcacgcaaaaaggaaatgaattacaatttaactatcggaaaattccgatttcaaaattaaatacttctttatcaagagaggcagagggaccggccctttgaagcccagcaacctcagtttatacgaactgaataggtgctaattcctgcaaaatgcattgcattttggaagataaaactcaactagcatgtaaagctcacctttcttgatattgaagggtgagctttttattatttgaaaaacatatattggaggtatgtaaaatgaaagtaattgatttatcgcaaacatttgaaaataatatgtctcaatttcctggaacacctaaaatacaactagaagctgttacaagtgttgaagaatcaggctatcaagttacagattttcattctgtcgttcatgttggcacgcattgtgatgctcctgcgcattttatttcaggcgcaacgaccatcgatcaattacccctaaatcaatttgtaggcgaagcggttcttattgatgtaactcatgtacaagaacgaaaactacctaaagaagtactggacgatgccgatataaaagaaggagatattgttattttccattccaatctatctactaaatggaatacagaggcgtatgagaaagaagctttttatctttctgaagaattagccgaggaactagtacaattaaaagtaaaatctgtcggtttagattttatttctcctgatgaggtaacgacagaaacatcaccaattcatcacatactacttgggaataatatttatttaatcgaaaacttaacaaacttagatgccattcacacgaaacgtttcttcttctcagcagcacctttaaaaattaaagatagcgacggtgcttttgcaagagcatttgctgtaattttttaaacaaactatacaaaaaagcaaagatcatcattgacctttgcttctattttttttatttaaattaagaaagaattgctcaacatgaggacgtaaccaagctaaataatccttctctttcttctttgtacaagctatttcttccccatctaccatttcaacaagttctagttctaacagttgcttcgtgaatgctaacatattcacttcttcggatggatactcttcttttaatttctcctcaatttcccccaataaaaaaccgtcacgcatcattgccaatgcatcaatccaaagtggcggcatttcatatttttctcctgtaattgtgtcttttacagtataattcttttgctcttttcgaaattgaatcgtgtgtaaacatacagtcgaatttaatgttaattccatcataccacctctttcataatatctgcatagaaaaaaggatgcgcgtgcaccccttcttatcttttcataacactactgaaccgttacatgagcaatcaatctcatgtcgatattttccttcattataaacgaagtattttataaaaaaaacccttcttgaaacattttataaaatgtttatatttacacaacaagaacacttttctgaaaaatcttttctcaaatacattaaacggtcggcagaaaaatttctactttcgttcctactcctacactactttggatcgtgatactcccttgatgttccttaataattttatatgtaatcattaatccaagtcctgtaccattctcctttgttgtgtaaaaagccttgccgattttttctaacttctcattctctataccaaatccttggtcttcaacagaaatacacaaatatccttgcgttttttgatatgcacggatatgaatttctccaccctctggcattgattctattccatttttaatgatatttaataacacttgttttaattgcttatcatcaccgtttatagccggtaaattcccatctacttgtaaatgacatttaactctatattgcgttgcataactttccattagatgcacaacatatagaagggtgtctcgtatattacacctttcataatttgttggctttggtttccctaacaacatcaattcactaacaaatccattaaccctttcaatttcttgtagcataatgtcgtagctcatcgtatcagttggatttctttctttttgcatttgcgtaaacccttttaacgctgttaatggatttcgaatttcatgggcaattgttgtagacatagtcccaatcacagctaaattttccgtctctttcatattgttcatcatttcaaccactgttcttacataagattgaaatcgttttaataaagaatgtgaaataatgaaataaaatacacataaaacaagtggaattatcacttttaaatcttgtaatagcaatgtgaaaaatacgtactttccaattacactaaaggaaactaaataaaagtattttctattcacgaaaactggggcaaataaaattaacaacatttctaccatactaccatgttcaaaaggtctatccgttcgcaaataaatcattaaattattaacaagattgataaacatgtatccaaataaaaataaatattttacagaatatacataccctcttttttgaagatatatagaaataggaaataatgctattacaaatataggcacacctatcccaagactaccttctggccaccctaccgctgttccactaatattcatagcaggatatacaaaataatatatagcgtcatataaaaagaatataatataaaataataatataaatacctttaaggctcttctttcttcataaatcaagctcttgtatttgttcatataaaaactccccttgatcgatacaaaaaactttcattgttatctccttaaagtataagtatgaaattgctttcagggcaatatttaaacttataatactaaaaggaaggagatctctccttccttttagtaacaacttatatccaccttaccctatcatgtaacaatccatcagtaaaattattatgccctattacaaaatccttcatatataaatttaaatactcaccgtacttactttctgtatttaataacaactcctcgacgtaataagcaccttgttcaaattgatctaaaagtaaactagacaagcccgcataaattccgcaccctacctgaaaatacgttgcattcgttttatatttacgaaaaacttggctactattcattacattatacatatatgtctcactattttcataaacgagtaacacaccgaccaagtcctctccagcaacctcttcttccgctggattaaacactttacgattccagttccataaatcttctacttgatctaagttctgtctaattatatttgttgtatactcattaattcggtaaagaaaaccaacttccatattgaagtttttccctaaaattaatacttcctcatgtagcattaagcaaccatataattctttttctcctaacttcactttatactctgaagcatatacatcttcataaaagtaaagaggacgatgataactcatatacatcggataactccagatcgcttcatctaaaaatcgctctactgcccatgaagcataaagtgtatgtggctttataagtgccgtatcattcaaaaatgatgtgtcatgttctacaatataacatgctcttggcctttcatttggtcgttccttcataagctcaacaaccatccattgaacaacacctggattcatacctgaacctataatcgcttttgtatttgtaaatttctctttctccttctcaaaccttgtatatctttccgtaagctgaaagccgattaagctgtcgtcctgatctactgcttcattttccaaggctgaattaatataacaaattcctagttcattacaacagcttaatactctaattgtatctgcccctgaaacatcaatcacaacactcgttcttttttcttttaaatgttttttaaattccactacattttgaaggtttatttcatataaatataattgatctttcaaattcgaaaacagctcatcataataagtcctatctttttgttttatatccaccaaatgaaatttggcattctttaatactttataaattggatctttttcatttactatcgcttgatttaaaattgctaaaactgcttttgctgctccaccagcactaccaagcaatgtaattgataacgaattcggaaactgctccacaaacaaaacccctttaataaattagttgagcagctcctcctcaaaaaataaattgaatacataataagatagctcgtacacaatttttataagttagtgcacagttaccttttaaaaaatcacactataatatgtttatattcaattcattttcccctcatatccaaattagactaaaacaaataggctcgaccttttcttctccggataaaagaaaaagccagccctttcaactaatctacggacaatggacggattttacatgttgaatattcacatacatttttgcatcacgtgcttttgatatttcaatatgaccttcatcaattttcgccatttttccaattttattggactcctcacctaaatcgaacaccataattttcccagccattttaataagctgttcttcaaacgttctagctaacgtaatatttaacggatttacggggagttcatttttattgagggcatacggtacttggttttctttatacggaattaaccattttaaatgctttaaagatatatataccgttttataaaccggactataaaaaacaatatagtcgttcatcacacttgtaacataaccatgtattggagcatttcctgctacataaacttctgtaaaaatccctttagaagtacttaatacttttctcaaagaaattgaaggggattccctcttaattacagaatcaacatctggttttagtatgtcttcgtcatgtgctcttaaaaatttatagtattgtacatgatataaagatatatatacatagtcttgtccattgtaaagaacaataatgtcatttcctacgtctattaatatacctttaaaccttttttcaccgattaatttaacatatatattttccccaatacttttgtttaactcattcatctatatcctccttcctatgaatttcagctttactatcttccatttcaaaaaaataatcagggcaatgttctgtcttaatagtaagtaattccttttcatactatcgaaataagaaattgttcttctctttccctcataatgcccctcttatttattaaacattattcatcttcattctttttacatttcactacttgactcacactcttaatatgataattaatgatataaataacttcatcaccgtttactagcgtaatacattcttcatgcacttcacttaataggccttctacacactctgggccgccacgattaatctttacccacttatacttcaagtcacgtaatacatcgacgaaagtatcatcatcagagcagaaacatgaaacatagccatcgccacatttactttctttcactttcttaactagactcttcacatgtttcaattggtaatatactaattcaccaagaggaagttgtaatgtaaggtaatctcttcctaacgatacaagtacccccactcgactctctggtccacgaagatttacttttacagtctcaccgactaagcctttaatttgttcacagcataatatactttccaaatttgtatcctcctttcttattatcttcctcttcttgactgtctttgtgcgcgagctcgacccgaatcatcactttcactattgctttcactgtcgctttcttcgctttctctacaagctactgcgacactcttaatatgagatactgcaactaatataacttcttcttttacaattagtgtcacaaattcacaagaaacatcttgtaaaataccttcaactttctctgggccaccacgattaattttcacccagcaatatttgaagctttgaagtaacttttcaaagtcatcttcacattcacattccaaccatctgcaatcatctgctttacaatctttcgcattttttgtaatacttttcagatgacgaatctgatagtaatagagctctcctttttcattctttaatacaaagtaatccgaacatacagcgactattgttcctttttgagattctggaccacccctgtttactctcacaaaagatccaattaagtctttcagaaaatcacaatgaaataaactcacgagaaaaccccttccattaatttataagcttttgcactgatagtatatgtatctgtacaggttacgttctctatgtttgtcctagctagaaaaaaatatgcttttaacatggtagactactacctatcaaaatttgaagaaaggctaagaactccttatgtttttgatatcttcaaacaaaaaatcccttatgaatatacatttctgcatatcttcataagggattttccatagtttaatcttcgtctttaacatccatatcttctggaattggttcgttcaatatttcttccactaattgcttatatttctccatttgttctaaatgtgtattaaattgttctttatttactaaatattgctctccatcgaatagcgcacgaattttcttttgctgaattaactcttcaatatacgattttggtaaattcaaatactccgcagtctcttctactgttatatacaatgcgttcattcctttattattttttcatctatactgtatcttactttactttatttttgtaaacaaataaaaaagattttgtaaatgcagttcaaaaagcaggtagatgcattccatatattgtatagtattatatagtaagaattttttaaatatagaatggtattacccatttacacaaaggagagttaacatatggctactcgtcacatcattacaatgttagaaaaaacactacaagttgaaacagaaaacacaatttctcatttaaatgtatctttatctgatcgttttctttctcaaagcacagcaatacatgaaaacaattgttatcatacaattggtgaatggtacaaaaatcatttcttattccaacaagatgatttcctttgggctaaatatgccttctatgacgcatattgtgaagccatcaaaaaacaaggtcatcttacaaaacgtgttcgccaaatattagaatcattagctcgaatgcatggaaaacaatatattgcttccatactaaatatgccatttcctaatgaacgcgctaaagggacagcgtaatttagccatgttctgcgtaagcaaaacatagctaaattgttttctaggatgctttaccaataaaaagttcatatcatacgaactgatgaaaccggtgtcattataatgatagaaaatatagtaaacaggaaaacccccacgtacatctctcatccatttgaatagagaaatacgtgggggtatacttgttccttattatttcattatctgcttaatcagttcgcgatttctcttcttaaatacttcattatgagaagaaaccattccgtactcacttgcatctggttggataaattgtttggctttattcacagcatttccagcatcttggaatgcacctgcaattaaatgtagtttcccttcgtgctttaaaatatctccagcagcatataatccatctactgaagactcactatttgcattacctgcaatataataattatctataattgcaacgtctaactcactattttctaataatgtaatgtcgcgttcatatccatgattaataataacttcatcaataggtaaatgagaaacctcacctgtttcatgatttgttaattctacatattcgattgcttcatgattatcaccagcaattaattttgtaatcgatgtattaaagaaacactccgctgagctgttcataagttgttttacttgtgcttcatgaccagataattcttcttttctataggttaaatacactttttccgcaattggttctaattcatttgcccaatcaacagcagaattgcctccaccggaaataataactgttttacctttgaaacgctttaaagatttaactgtataatttaaattcgatacttcaaatcgctcagcaccctcaatagataacttttgcggtttcaatataccacttcctgttgcgacgataactgtttttgaaaagtgttcttccccagtacttgtttttaatgtaaaagtaccatcttgattacgaataattgattccacttttgtatctaatacaacttctggcttaaatgttaacccttgctgtacaagttgttcaattaacttatcacctgtaactggtaatagtcctcctacatcccaaatcattttttccggatacacatgtatttttccacctaaatgtggttgaaattctattattttcgttttcatttctctgagtccactataaaaagctgaataaagccctgcaggtcctccgcctatcacggttacatcaaacaattcttctcgattcattcgtgctcactcctcagctactaatcattgattatcattctcaataaaatataacctgtttccgcaaaatttacaatcaaaattactattgacaatacacctatataaaattatattatttaaagaatcaatagtgataatcattatcattttgttaataattagcaaatttgagattacatcttctttcattactatggttattactatattataaaatctcatattcaagatttttaataaattattttgcattaccactactatttcaaaaagattacagttaaacaaattattgtatacacatatcatctatgttaaaggagaaagacgatgaaaaagttatttatttcactaacagtccttttcgttcttgttatgagcgcttgtagcaatagctctacagacaaaaaggacgatgcaaaaggtagcaaatcagaaacaattacataccaatctgaaaatggtaaagtagaagttcctgcaaatccaaaacgcgttgttgtattatcatcattcgctggtaacgtaatgtcattaggtgtaaatcttgttggggtagattcatggtctaaacaaaacccacgttttgatagcaaacttaaagatgttgctgaagtatcagatgaaaatgttgaaaaaatcgctgaactaaatccagatttaatcattggtttatcaaatattaaaaatgctgataagttaaagaaaatcgctcctactgtaacatacacttacggaaaagttgattacttaacacagcatttagaaatcggtaagttattaaacaaagaaaaagaagcaaaaacttgggttgatgacttcaaaaaacgtgcacaagacgctggtaaagaaattaaagcaaaaatcggtgaagatgcaacagtttctgttgtagaaaacttcaacaaacagctttatgtatacggcgaaaactggggccgtggaacagaaattctgtaccaagaaatgaaattaaaaatgcctgaaaaagtaaaagaaaaagcattaaaagaaggttactacgcattatctactgaggtattacctgagtttgctggtgattacttaatcgtaagtaaaaacaaagatactgataactcattccaggagacagaatcatataaaaacatcccagcagtaaaaaataatcgcgtatacgaagcaaacatgatggaattctatttcaacgatccacttacactagatttccaactagacttcttcaagaagagctttcttggtaaataatacaaacatgaggaattcttaaattaagaattcctcttcctttattctatgaacagaaaagatgtgaaacgaatgacaaaagatcacgacaatccacgttctatagcttttacatacaaactaattttgagcataattgcattctttcttatttttatggtggcaatggtattaggggctgccgatacttcaataaaagatgtatggttagcgctcacttcctctgctaaaggggacaaaatatctattattcgagaaattcgtttaccacgtgaagtagctgcaatttttgtaggagctggacttgctgtttctggagcaattatgcaaggattaacacgaaatccgcttgcagatcctggattactagggctatctggtggagcaaatgctgcacttgcactgacacttgctttcaacccttccatcagctatctttacttaacattagcttgctttatcggtgctgcaatcggtgcgattatggtatttggaattggtatggtgaaaaaaggcgggctgtcccctcttcgaattgtattagccggtgctgccgtttcagcatttctactcgcaatttcagaaggagtcggcatttacttcaaaatttcacaagaggtatcactttggactgctgggggcgtaattggaacaacttggggccaattaaaaattattattccagtcatttcaattagtatctttatcgctatcttactagcaaaaaaattgacagttcttagtttcagtgaagaagttgctattggactaggtcaaaaaattattgttattaaaaccattctatttatcattattatattacttgctggtgcgtctgtagctcttgtcggaaatatggcatttatcggcttaatggtacctcatatggtacgtccaattgtcgggccagactaccgatttgttataccaatgtcagcaattactggagcttcctttatgctacttgcagatacagtcggacgtactattaacgctccgtacgaaacaccagttgccgctattgtcgcaattgtagggctgccattcttcctattcgttgtacgtaaaggaggaaaaacattctcatgatgcaatctattctaagaaaacaacgtcttattatactcgctttactaatactaaccatcacaaccattgtagttggaatgggacttggttcagcatctttatcttatgatcggctactcccaacattaatgggacaagggacttttaaagaggagtttgttttatactctttacgactacctagaattgttattacattattagctggtatggctctcgctttatcaggtgctatcctacaaggaattacccgaaatgatttagcggaacctggtattctcggtatcaactctggagccggtgttgctgttgctattttctttttatactttccaatagatgtaggttcatttctttacttactacctgttgttggatttatcggcgcatttctgacagctgttctaatttatgtattttcttatagtaaatcaactggacttcagccaatccgactaacattaactggtattggtttttcatttgcactatctggaatgatgattgtccttatttcatccgctgatcgtatgaaagtggactttatcgccaaatggattgcaggaaatatttggggagatgactgggtcttcgttttagcaatgctcccatggttaatcgtattaattccgttcgttttctataaagcaaatcgattaaacattctagcattaaacgagccagtcgcaatcggcgttgggattgaaattgaaaaagaacgcagatacttattagtcgcagccgttgcgcttgcagctgcagctgtttccgtaacaggaggaattagttttgtcggactaatggctcctcatattgcaaaatctttagtaggtccaagacatcaaattttcatgcctatcgcccttttaatcggcggatggctattgttattagcagacacaatcggacgtaatatcgtcgatcctaacggtattccagctggtattgtcgttgctttaattggtgctccttactttatgtatttattgcttaaaaaggcgtaagaaacaccctcaagattttttcttgagggtgttttttatttcattctactgttgcccatacccttcaaacttcttcgccaaattctccatctcatcttctggcaatagctttggttccccaatgcttttcgtttgataataaatttgagcacaaaactcaatctcttctgcaacagtaaatgccatttttatattatttgcaccagcaattaaaccgtgatttgcaagtagcacagcacgacgatcaatcatgccttcaaaagcagcatccgctaattgcttcgtaccaaatgtttcatacggcgcacagcggacattcggacctgcaaaagcaattaaatatgacacagccggaagctcccatcctaatgacgcaatcgtcttcgcgtaaggagaatgtgtatgcacaagcgcatttatatcttcacgcttcctatagtaaataaggtgcatatctaattcacttgatggttttctctctccttctattacttcaccatctaggtttaatataactacatcttcaggctttgtttcatagtactctaaaccacttgggctaatcgcaacaagaccttgttcacgattaaagatactaatattaccacccgtcccctttgttaaaccactagaaatcattttctttccatacgctacaatttcttctctttctttttgtaataacatatacatccccctaagtatgaagcttatgatgactgacttttatatttatctacttattgaaatatcttttttaaattctccgtaaacggtgcccttacaatccctttttctgtaataatcgctgttacattttcatgtggagtaacatcaaatgctggattatatactttactttctttcggagcagaatattgtccgaagcgattaatcacttcagaagcatctctttcctcgatgggaatttcttttcctgtcggtgtttttaagtcgattgtcggcgttggcgctgctacataaaacggaatgttgtagtatttcgctaaaatagatacgcctaatgttccaattttatttgctatatcaccgttcgctgccacacggtcgcatccaacaattacagcgtcaatcttcccttgtgacatgaccatagccgccatattatccgtaatgacagtaacatcaattcccgctcgctgtagttctaatgccgttaacgttgacccttgtaatcttggacgtgtttcatccgaaaagatttttaagtcccatcctttttctttcgctaagtacattggagccgtcgcagtaccatacttagtcgtcgctaacgcaccagcattacaatgtgttaatactcccattccatcatggaataatgttaatgcatgttctccaatttgacggtttatttcttcatcttctctatgaatttcttttgcctcttctagtaatctatctttcaactgtgagattgataaatgaatattatctgccgctacactttccattctttcaagtgcccaaaataaatttactgcagtcggtcttgatgtcgccaagtatgtacatacctttcttacttcatccataaatccttcttccgtactttcagcaaattcctttacccctaaatacactccataagctgctgaaacaccaatcactggtgcacctcgtactttcattacttgaatggcatcccacacactttcagctgttttaaatgattcatagacaatttcattcggtaataacgtttgatctaacaaaactaaagcatcatctttccactgaattggtattaattgctcttccatcatattctccccttactccgcgtagtgcattgactgttcttttaacgtttctacaaaacttctacctgttctatattgattcgctcgtaaaataaaactcttcgctactttaagacaaatttgctccgctctagcacgtgcttcctcattctcaatacaagtaatatcttttactttcgctaatccaacaatacggcggattaattcaagacctgtcactgcagctgtatcctctaatacagattgtaaatatacttcgttaaagccttcttccttcgccataatctcggtcacatgaatatcccaagcatctaaaaacttcttcttaaataaatcaattacctctaccatcgtagtttgtaaccaatccatatacgtatctttctcagctccaggtggcatcgttgcatctgcattcacccaagcaaacattaaattcgccattacattcccaacgtcatatcccataggtccataaaaagcaaactcaggatcaataacctttgtagaatcatctcttacaaaaacagaaccagtatgtaaatcaccatgaagcaatgcctgtgcattcgtcataaaagaaaatttacgtttcgctacttccatacgaagctctttatcactataaatatgctccctaatccatccctcatttaaaggaaataactcattacgcttattatgatttgtaaatggttctgaatatacgaggtcctctgtaatctcacataattcaggatttatataattcttcacaagttccttcttctctttatgattcattacaacatcagatgttaataaaagtgtatttaccataaaagtagttaagtcgtcagcaagctgcggaaatatttgatgatttataagtgctgtacgtaatattgtgtgattcgataaatcttccattacgcaacagttcatcacactatcaaataaatacaccttaggaacaagtccaggtgctaactcattctctaactgcaaaacatctgattctatacgaatacgattcgtcgataacttaaactcatctgaaatgcgagctgtatccccagcttgctttacgatgacagacatgttctcttttttatcccaaacgcggaacacataatttaaattgccatcacctatttctttacactttagcccctttgcatgttcaaacttagataatttctctttcacatatgcaatcacatcgctagcttccattaaaaaatactttgtgaacttagacatggtttcccctccacaccaattgtaagcgttttctaaaagctataaaaaataataggttgaattttttcatcctataaatatgtattcttctttttgaaaggtatatctaggttttattatatcttgttagcactttgagtcaatgtttctaactatcagcgtaatatacttcctaattatatatttgagatgacaaaaattgttcaaaaagatttcgattcattttattttatttatcgcacaattctttgtaaaatagaaataagcagttccttttcaaatacataacttctaagaaatatttccttcctaagaatttacacttacaccatatttctaacatacacactactctttcaaacaatcattgaaaatttataaacttaaagttacctttccattccctgttagccttaattgagaataaatattaattaaattggtataaagttggtttattctcttgacaaaataaccacttctatatgataattaatatcgaattagaattattatagttaattaaaaaatatattttatgagcacactattttttgatgctcaaaaccaacatttaggaggaattttaatatgttattaatcggcacagaagtaaaaccgtttaaagctaatgcttaccataatggagaatttatccaagttactgacgaaagtttaaaaggaaaatggagtgtagtttgtttctacccagctgacttcacattcgtttgcccaactgaacttgaagacttacaaaaccaatacgcaactctaaaagacttaggcgttgaagtatactctgtatctacagacactcacttcactcacaaagcatggcatgatagctcagaaactatcggcaaaatcgagtacatcatgattggtgacccaactcgcacaatcactacaaacttcaacgttttaatggaagaagaaggtcttgctgctcgtggtacattcatcatcgatccagacggcgttatccaatctatggaaatcaatgctgatggtatcggccgtgacgcaagcattcttgttaacaaaattaaagctgctcaatacgtacgtaacaacccaggtgaagtttgcccagctaaatggcaagagggttctgcaacacttaaaccaagccttgaccttgtaggcaaaatctaaggagttcgatcaaaatgatactagatgcagatataaaaacacaactatcccaataccttcaattaatggagaacgatattttacttaaggtaagcgcaggagacgataacgtatctaaagatatgttagctctagtagacgaattagctactatgtcatctaagattacagtagaaaaagttgaattagagagaacaccaagctttagcgtaaaccgccctggtgaagacactggtgtcgtattcgctggtattccattaggacacgaatttacatcattagtgttagctttactacaagtaagtggacgcgctccaaaagttgaacaaaaattaatcgatcaaattaaaaacattcaaggcgaatatcattttgaatcttatatcagcctaagttgtcataactgtcctgatgttgtacaagctcttaacgtaatgagcgttcttaaccctggtattacacatactatgattgatggcgctgcattcaaagaggaagtagaaagcaaagacatcatggcagtaccaactgtttacctaaacggcgaatctttcggaagcggtcgtatgacacttgaagaaattttagctaaaatgggtaacggtccagatgcatcagagctttctgataaagatccatacgatgttcttgttgttggtgggggccctgctggtgcaagtgcagcaatttacgcagcacgtaaaggcatccgcactggtatcgttgctgagcgcttcggtggtcaagtaatggatactatgggcattgagaacttcatcagcgtaaaaaagactgaaggtcctaagctagtagcaagccttgaagaacacgtaaaagaatacgacatcgatgtaatgaatctacaacgtgcgaaacgtttagagaaaaaagaacttattgaagtggaacttgaaaacggcgctattctgaaaagtaagagcgtaatcgtttctacaggtgctcgctggcgtaatgttggcgtaccaggtgaagctgagttcaaaaataaaggtgtagcatattgcccacactgtgacggtccattattcactggaaaagacgtagcagttatcggcggaggtaactctggtattgaagcagctatcgacttagcaggtatcgttaagcacgtaactgttcttgaattcatgccagaattaaaagctgatgctgtattacaagagcgtcttaacagcttaccaaacgtaactgttctgaaaaacgttcaaacgaaagaaatcactggtactgataaagtaaacggtatttcttacatcgatcgtgaaactgaagaagttcatcacgttgaattacaaggtgtattcgtacaaatcggtcttgtgccaaacacagactggttaggcgaaacagttgaacgcgttcgcggtgaaatcgtaacagacaagcacggcgctacaaacgtaccaggagtgtttgctgcaggtgactgtacaaataatccgtacaaacaaatcatcatctctatgggttcaggtgcaaacgcagctttaggtgcatttgattacttaatccgtaactaataaaaaacaggtgccttggcacctgtttttttattaccctaatgtataaactaaaaacctctcattcccattcttctcataagcacctggcaatctaacttctttcttcagctcaaacgcagtctgattttctaagaagaaaatatagtcctcagaaggataatataaaataatatccacttctctccccgtattttctactgaaagcaaaatgttatttactacattcataaacacttgcacagaaaacggattaaagaaataaaacctattatcatgtggatcaatcttatattcctgcgctaaacaacattggaattgaattttccccttactgtttcgtgcctttcgggcataacgatctcgattatccatcgcttctttataaaattcttcattcatttcaattccaactgctgaagccccacatttatgatgcatataaaagtttaatcgcccttttccgcacccaaagtctacaattcggtcgctacttcgtatttcatattgattcaataactcatctaacccgctatacggcgtcggttcgtagcggtgataatgcatagacttgttaaaccctttttgctcaccgactgtttttatatgtaaaactgcatcgtaatattgttcgttcattcgttttctcctattaaaaaatggtacttattattatacaccatgtactggaggctcatttttcatcaaattaataggtacgtgaaattatattaacgattttcttaatatatctatcgtaacttcaaatatatcaacgattttctcaatatatctatcataacttcaaatatatcaacgattttctcaatatatcgatttaccgacaattcacgacaaaaaaacaggagctctttagcccctgtcttctaacactttcaatacagtttgtttcaatatttctaccccatccataatacaactatgatcaaacctcatatacggatggtgtaatccaggttgtaggtctgctcctagtccaagcatgacagcttttaaatgtggtcttttcactgtatagtaatggaaatcatcgcttcctgtcgtatagagaggccctgtgcatctctcttccccatacacttcgagaatacctttacgcataaagcgctctgcttcttcggaaacctctgctcctggtgcaagatccatccattcgtatgaagttttcgaccccatcgatgcagctgattctattacatgctcaatctttttctttaattcttctaatagtatattactctcagctcttacatctaaactgaaatgaccatttcctggaatgatatttaaattatcaccacctgcttggcatctcgtcatttttactgaataggaactttgcggtggcagccaaatatttttcaaaccgatattaatcatggaaatgacatcaattgcattcacaccttggtgtggtcttgccccgtgtgcatcctccccatgaatcataccctctaaaaatcctgctgctccatggcgaatagatggggctgcttgtttcaaagatagttcttcaattggtcttagatggatgccaaataagaaatcagcatcatctacagcacctttctccaccatcttcaaagcaccattccccttctcttctgccggctgaaaaataaatctaaccataccacttttccatctcatatttttcaattgtaaaataagtcccattacaatggtcatatgagcatcatggccacatgaatggttcgctttaaattctccatttacttcttgccaaagtgcatccatatcagcacgaatcgcaataactggattcccgcctccaatctcagcaattacacctggacaatcatcaaatgttctatatgaaattccttcttcttttaaaaagtcagtaatatacgctgtcgtttcatattctttccaacttacttcagggttttcgtgtaaatgctgaaaaatctccgttaagcgctcttgtagttctaatgttttcaacgttccagtctccttcccacattacaaacgattcgggttaattatacttatgaaaaacagatgtttttatgaacatattgaattttaagaaaaaagtcaattgtttatttttaaatacttaaaaaccttactctgcacttatattacaaactaaacaaacaactagaacattccttattttctgttttttatgttgacgcttacataaacttttagttatcataacctaataaacgtctattttacgacaattctaaaaatacaaacaaacatacgtaacaaggaggaactttatgaaaaaagaaataccttttggaatagcgattatccctattatcattaccgttgcagttatgatggttacaattgttgtattaaaacaaacccctcacgttccacttattatcggtacaaccgttgcttctattgtcgcttggcgttatggttacaaatggaatgatcttgaagaagcaatgtataaagggattcgtcttgcattacctgctatcgtcattattattcttgttggcttaacaattggtgcttggattggcggtggaatcgtcgcaacgatgatttattacggtttaaaacttttaactccatcactatttttagtttccattaccgtcatttgttctatcgttgcattagcaattggtagctcttggtctacaatggggacaattggtgttgctggaatgggaattggcctaagtatgggaatcccagctccaatggttgctggtgccattatttcaggctcttattttggcgataaaatgtcaccgctttcagatacaactaacctagccgcaggattaacaaatacagatttattcgcacacattcgtcatatgttatttactacagttccaggtttaattattactcttatcgtctacgcggtcttaggaagaagcttcggcgctaacaatattgatgcgaagagcatcgatcaaacgttacaagtattgcaacaaaactttgttatctcacctttcctactcattatacccgtagtcgttatggtattggtcgctaaaaggtccctgctataccagcgattctcgtcggtattattttaggatttttatcacaagtctttattcaaggtggttctgtctcagcatctgtcggtgcactccaagctggatttgttatagacactggaaacaagctagtagacgaactatttaaccgcggtggcttagattcgatgatgaatacagtctcgatgacaattgtcgctatgactttcggaggagtattagaacatacaggtattcttcgctcaattgtaaatcagattttaaagttagcgaaatcagcaaaagggcttatcgcttctactatcgcatcttgttttgcaacaaaccttacttgctctgaacaatatatttcaattgttgtcccttcaagaatgtacgcaaatgcatacacagaaaaaggactacattcaaaaaacttatccagagcattagaagatggcggaacattaacttctgtcttcgttccttggaatacgtgcggtgtatttattctcgctacacttggcgtaggtgcatttgaatatgccccttatgctattttgaatttcatcgtacctattatctcaatcatttatggtataacaggcttcacaattgtaaaactatcagacattgaaaaagcagaactgctaaagaaacaaaaagctcaactagaagcttaaaaatagcggtaaattcagttcatatagtgcgcgaggtcgcccttgttgatagggcatttcctcgccgcaaatatgagcatacccgtaatcaactaatttctttaacaacctttctgtcgatcttcgagtcacttgtaagtactcagaaaggtcagctgctgtaaacttcaatgacggatgcgattgactaaattgaatgatttttgacaagttggccggactaagcttcgtttccttcgctattttcattagttccggattatcatttttcaaactttgtactctctgttctttcgggaacggaccaaacaaatctttatcacttgttagtatataaaaacaacgatctattggattattctttgcaaaactttgagcaatttttgcattttgctccgcctctttcacggtttttccataaccaaatccaatagctatcgttccttctacgctcgcaaacaagttatttatcgcatttgttttaataatcgattcgatatcaccacgagttgtatacaaaatacatgtcatttcatccacttgtttaaatgaaccacgtagttcttttgaaatgacatctagtttttcaagcaaactcgttcgtaattctagggaagaaataatacaagcaccaacagtagctgaatagctttttgctaactcagcttttatttttgcatcttttagaccatgtataatggattgtgttggatcaatcatgcgctctgaaggaacacctattttttgaagctcgtcgtaaacagcgtgaatactagttaaagctaaatgagcttctccagattgatatttagctacatgaaaatcgataactctatttatttcatctttactccacagcatattttcataatccaacacttgcgggctttcttttataccaatatcatggaacacatttgtaataaacgagcggtctactaaatcgatggaaatgttatgtggttgaatactttgatgatacatgatagaaagaattgaagatgcgacagttgtctcgtcttgctgtaagtatgtacttggaattcgtaattgttctcttatttcttttgccatataataaggtaaagcacctgagaaaaagatgacatcacaaggctttagacactttaataattcagaagattccgccggatgaaggtaaatatatggatcaatttctattccttctaatttttgagcaataggaaaaaggttctccataaactcctttgaaccgacaactgcaatttttatcatcattttctctaactccttatcattaattaacgactatttaacgtcaactatatcaaatgtacaaaactattgtaaacaggaaggggtttctattcaatgaaaattacagctattcatctttacgcaattcgtttaccgcttcgcaatccgtttgttattagttatggctcttattctgatatgccctctattatcgtcaaaatggaaacagatgaaggtattatcggttacggtgaaggcgttgctgatgatcacgtcacaggtgaatcatgggaaagtactttccatactttaaaacatacgctaacccctgctctaatcgggaaaaatccaatgaatatcgaaaaaatacacgacatgatggacaatacaatttacggtgttccaacagcgaaagctgcaattgatattgcttgttttgatataatgggcaaaaaactaaatcaacctgtatatcaattaattggcgggcgctatcatgaagaattccctgtcactcacgttttaagtattgccgatcctgaagatatggctgaagaagctgcttctatgattcaaaaaggttaccaatctttcaaaatgaaagttggtacgaatgtaaaagaagatgtgaaacgtattgaagctgtacgagaacgtgtaggaaatgacatcgctattcgcgttgatgtaaaccaaggctggaaaaatagcgcaaacacattaacagcactgcggtcattaggacatttaaacattgactggattgaacaacctgttatcgcggacgatattgatgccatggctcatattcgttctaagacagacctcccgcttatgattgatgaaggactaaaaagttctcgtgaaatgcgccaaattattaaattagaagctgctgataaagtgaatataaaactaatgaaatgcggtggcatacatccagctgtaaagctcgctcatcaagctgaaatggccggcattgaatgccaagtgggatcaatggtcgaatcatctgttgcctcttccgcaggattccatgtcgctttctcaaagaaaatcattacgagcgtagagctaacaggaccattaaaattcacgaaagacattggaaacttacattacgatgtaccattcattcgcttaaacgaaaagcccggactcggcattgaaataaacgaagatacactacaagaactaaccgtctttcaagacgttgtacgctaaaggaggactatcatatgacggttctatacgaaggaacattaaaacaaaataacgaatcatttcacgttacattactatcactagagcacatcgaacaaattttatcactacaaaacatcgtagttgaagcactagaagataaaagtcgtttacaaccactctcactagaagaatttcaatacattctagaaggaaacggcatgatgatcggtgcttttatcgaaaacaaactcatcgcatttcgcgctctactcgtccctcctatcgacgatgaacatttagggcttgatattggtctatcagaaagtgaactgcaccgcgtcatctatcaagaaatctcaaacgttcatccgaactgtcgaggaaatgggatgcaaaaaatattagcaaacgtcatcatggacgaattacaaaaagaagatagcaaatatgattatgtatgctgcaccgttgctccttttaacatcccgagtttgaaggataaatttgcgcaagggatggagattgctgcgctgaaggagaagtatggtggtagtctgcgatatgtttttgtgaagaaattgcgcggagataaagaaagcgattggacggatgttcaaagtattctaatgagtgatgctagtggacagcaggctttgctttcggaggggtatcgtgggtatgagatggcgaaagtggatggggattttgttgtgatgtttggacgctaacctatatactcgaaaagaggagatgtctgctgtgacctctccttttactttctcttcattgaacatatcgattgcaactccgaatatatcagcgattttcaaaatatatcggcgcaacttcaaatatatcagcgattttcgaaatatatcgacttaccgacaaagattgacaataattgcaacctatacaaagcgcaacattaaaccgtcatcttccaactagataaagctaaccagttctccatttccttataatcgggcatgattttcccgacaagacgccaaaacgatcgatcatgatttaaatgaaccatatgacacatttcatgaacaactacatagtcaattactcgctgtggtgccattgctagcttccaattgaatgttagttgtaaattcgaatcgcaagtaccccaagtacgactactatctgtaatacgaatagaacgtggttttgttttgaaattactttgatgcgctttaatactcttctctactaaagatttacactgcttatagtaaaatcgttttaaagcttgttgtattttctcatccttaagctctttcacataaatatgtaacttatcccctttaaatactgcgttgtcttgctcaatgcttgcatcttgggaaatctgtatcggatacgtattccctaaatacaaaaagccttctccttgatcataatccttttcctgtggtccatgcgctcgctcctgcatttctttacgtgttgtctgaatccacccccacttctcttctagcaactggactaagtattcaacaggtgtccctttcggagcctgtatttctacatttccatacgaatctacaaaaagacgcacggactttttcttcttataagttatatgaaaattaattgtctcacctaaatatgtatgtaccatttcatcacctagcatagtatttttacaaataaaaaagagtaggatacgaacgtcctactctacctattatatcatttactgctttaacgaactcattatcctctatactttacacctaatcccttaatgaaattccttgcgtatctatcgccgcactctttgtaatttttatgacctttttttcttaatagagcgcctaactctccttttgttaccgtaacgcctacgctatctaatatatcaagtacatcctcactcgttaaagatagtgcgattttcattttctttagaagaaggttattggcactctccttgctctgtacaggtgcaggctgccctggtttcggatcttgctttcctctttttaaagtaataaatccatttaaaaatgcctctaacatcatcatatcgcatgtttttacgtactcatcttcagctacctcatcattttcagcttcatgctgaggagctctctttatttttgtaagcatatcaactacgtcttctttcgttacttccatcccgccaagtttaaagatttctaccatatctatatcttttatatctaaagcgtatcgtactctttttaatatatcgttgttgctcattgccattgggtttcctcctgaaatgttgattatttattcagcggttaaagtttatgctataacctgctttaaattatcatgtttaatctaaccttttagttattgtccgctaaattaatactttaacattttaaagatatgttttatagtcttacccgaacttttctctatcattgtatctacagagctcttacatgttttttatatgcctataaaaagatttctctcttaacattaactaaaagaaaaaaacagtgctttgatttctcaaatacactgttcttttccagctctgcacttattttcaactcactcatgtcatgcactacatatgaaatgatttaactgcttaaaagttaaaccatctcactatcctgagccacaccaacactatcctcaaacttatccaacaaagcacgcacctcatcggtcgatttcgtactcatcaattgatttctcaattccgcagctcctgggaagcccttcacataaattttgaagaagcggtgaagtcctgtgattgagcgtggcagtacttctgcatattgatcttgaagatcaagttgtagtcttaaaagatctagatgttctttactgctatgttctcttggctctttttcaaacgcaaatggatttttgaagatgcctcgtccgatcattacgccatcaatgccgtatttttcagcaagttccagtcccattttacgatcaaggatgtctccattgattgttattaacgtattgggtgcaatgcggtcacgtaattttttgatttccggaattagttcccagtgcgcatctacttggctcatttcttctcttgtgcgtaaatgaatagaaaggtttgcaatatcttgtttgaaaatgtgcgttaaccaatcttcccactcgcttaactctttaaagccaagtcgtgtttttacgctgacaggcagtccacccgcttttgctgcttggataagttctgctgcaacgtctggacgtagaataaggccactcccttttcctcttgatgcaacgttcggtactgggcaacccatgttaatatcgatacctttaaaccctagttctgccataccgatactcatttgacggaagtattcaggattgtctccccaaatatgtgctaccatcggttgttcgtcttctgtaaaaattaaacggccacgtacacttttcataccttctggatggcaataactatccgagtttgtaaactctgtgaagaatacgtccggacgacctgcttcacttactacgtgacggaaaacaacgtctgtcacatcttccattggtgcaagtacgaaaaatggtcgtggtaattcacgccaaaaattatctatcatttcaaattcaaatcctctcactatgaatacaatttcaaaatctaaatttataatttgtgaaaatcagcaatatttattttaactaaaatcgcttatgaatggtatttttgtaaaccaaaaagcaggtggtatagattttttctatatcaactgctttcctattatactaacttaagccaagccacacactccacatgagtcgtataaagtatatcatatcttttggtatatcctatattactgtagtgcattcttttgcaaaaaaataaattaaaatgtcctcttgttatttcaaatgaatttaatttattttaagtgtgtggtcatctttgtggtcagtggtcaaaaaagagccgagttttatactttgctcttttttttaaaattttatctctcaccctctttaaaaagaacgtttgttcgtgtaaaataatgacatatcatacgaaattgagggatcatcatggaaaatcaaagttggggtacaccgaagattaaaggaagagggatggttttaacaatagtataatatatgagtagagataacgtatacaacgataggtagttctcaattacttcagcttcttctgactcttctgtttctgtaattacttccacttcttcaggtgcctctgtttccataactacttcttcaaactcttccgtttctgcaattacttctacttttgacacttcttctggtatttccacaatgattgtttcttcaagtttttcttctgctttgacaatcactgattcttctggagcttgcttttctacttcaatagtaggttgttttatttctgtattacgtttaatttcttctgataatattgtatcctcgtgctctactttagaagctactaattcttcttgtagattgttttcgtttaacaccactacatctttttctagcttagcactttccatctgctcagctactgttttatgaagtaattcatccgctgaaacttcctgcggtgtactcatttcttgaatcacttctttttcttctactaaaggcacttggcgttcaatttcataaccgtttttctctagccattgatcaactactgacttttcttcctttttattctctttatattgttgctctccttgctggttagcagctctatgactagaagaagttggtgcttgtccttctgagaaatcagataatgtatatccttttttctctaaccatgcatcaacgactgatttaccctctacagatatttcaaggtcttctctttcctttacttcctcctgcttttcttcctttttctctactgaaggacgattatatccataaattggcgaaatcatttctgttggccgaaatggtctacggttactctcttgcgctggtgtagatgctttctttacgacagactcccgcaccggttcatattgcacttccggctcttcatatgtagaaactaccttttccacatacggtcgtctgcttctttccacctttattcctctttgggcagtcggttcttcatatgttactccttgaacaggttgttcttcgaagcgatttacttcgctttcatcctcttcatcgaacccattatccggtactaaaggaaaacggcatttacctgcattcctacttgccatttgtgcttctcttgcttcagtgtagtggtttacacgaggaattttcggctgactttcaatttgctttggtacttctttattcatcgctgtttgttcttcctctttgttaaacagctttttcatccaatctaacatgcttaccactctttctactaaatagtaacatcctttattgtatcagcattcggcaaaaagtgcaggtaaaattaagcatgtcatatttatccataatattctaatttacgagtgttttcatataaaaaaacgcagtctttcatgtaagactgcgtttaagctttactcttccgatattcatctacactatccgttacactttgcaacaaggaatttacatactgcgagtcagataattttttatcttcttcaggatttgacataaacccaagttctaatagtacaccaggtactttggaccaattaaatccagaaagatcatccctgaatttaattccattcactttcacttgttgattctctctcattttatttacaatcgtttgagagatttgaagactttccgcataaatctctttcgtatacggacttccttctgccggcgtcaatacagcgaatccactttggtttggattttcagaaccatctgcatgaagacgtaaaaataaattagccttatgattatttgcgaatgtcgccctttctttattacttatatcaacgtcttgtgatgttctcgtcattaatacttgtatcccttttgcttcaagcttttcttttaataaaaaagccatttctaatacaagtacagcctctctctttttcgtcacaacacctgttgtaccgtctgtcactttatatttttgcgttgttgcccctggtccaatcggctctaaatttaaattcgctttttgttgatgccctggatcaataacgacgagaaacttctcttgtttttcattactctctactttttgttcattattttgcactggttgctcagtcggctgcactggcgtagtttcttctttcttttcatcagatgatacttcctcttgcttatgttctacttgctcattcgtttgaattgcttgcgattcttcgttcttttcttgttgcttttctaccggtgcgtcttctttggtatctttgtttttctcttgtatagaagatgtagtttcttttttcggctgcccttgtgaacaaccggccatatatattccaatgaatgcaatcatgctcattatttttatatacttcatacttctctcccatcactttgcaccggattcaaagtttttcttataattgccctataatctcatctatatttccaatataaactggttgccatttttctgtaccacgttctgcagtataaagcggataagcggcatcatctatatttacgaaaactggatcgcccatatccgtttcatatccaattgtaatccattcttctttccattttccgtgttcttcacttattaatgaatttttatgtttatcgtatcggtaaccgatttgtcctttttctaattcactttcactaaacaaatatatttcataagtacctagctcaacatcttgctgttttgaagtttcaattcgttttagaagttctgcgatttttggttgctgtttcatacttctatccccttctacttttctaaattttaactagattgtttataaaatacaatatagattttaagaaaaaaagtgacatccttatcatattaacgattttttaaatatatctatcacaactctcaatatatcaacgatttaacacgaaatttcgatttaccgacaaagaatgacaaaaaaagagaggctgtccaaaaggacaacctctcttttcttatatcaattaaaatttaaactcttgtccaacttcaaagctatcttctaatacaagaatacctttttcttgtggagcatctggaagctctaattcacgtgcagagcagatcattccagaagaaggaacaccgcgaagctcagctggcttgattaacataccgcttggcattacagcgccgatttttgcaacgacaactttttgtcctgcatcaacgtttggtgcaccacatacgatttgtaatgtttctgtaccgatttctactttacagatgtttaacttatcagcatttggatgtttttctttttcagctacatagcctacaacaaatttcggagaaagatctgcttctactgtttcttcaaagccattcttcgctaaaatttcgttgattttctctacaagctctttcgttaatgtaaggttgcctgtttcttttacttctaagtaagaagatgcattaaagatgttgaatcctgctgtctcgttgctttcacgatcgtatacgcgtgcaacatctcctttgcgatcaaaagtacggttctctaaagtaatatcttgtaaggcaacaattaaagtgtcaccaattccttcaaggttgtaaaaaacgttcacttcgttcatcctttctcttttccatctgtcttcttccgatttttcgctaaaataaagattggttcaaattctccatcttcatatacgaatgaaagtgatgtaatcggaacatgcccttcggcaaaaaatttcattgtcatttgtgcaataatatcataaccgatttcgttgacgatatcagcaataattaatacatcttggtgaggaacagcaacaaccatgtcaccagaaatcttttcacgcatcgattgtagtaacgattcgtttaaaatacgagtcgcgtcatacccatcatttgtgtttaaaaagtagaatgtattacccgctactgtgtcttgtttaaattcataacctaatgagcgtgcgttgaataatgccatttcacgcacttgctgttctgtaagttctaatttttgtaatagacgctcgtcaattagtcgatacgttttattcgaatctaacgcatagtaaatacgtgtttccgccgtatgatccgtcataataaacggatttccttcttctgcttgtttcgggaaagaagtagagcgaataacaggtaaaattttcgctccgctattttcttctttatgcatcgcaattagcgcttcttgtacgtaataagcaacttcttcaattgccttttctttgttcacttcccattttgccacaactcctggaagcgatacgttaataccttttttggagtctttttgttcaatacgtaaaacttctttctcactatcatactgaaagtcccattctgggcgagataatttctttattagctcatctttcatctttttacttgtcatcttcatctctttttcctcccttccaaaaaaataacctcccccgcgaaggtagaggttgttttacaattcaattggcaaattgccttattttaaaccttcaatgaactcttcgatttgttcttgtgttttacgatctttgtttacatagcgaccagtttcttcacctttattgtacgctacaaagctcggaatgccaaatacgtctaattttacgcatagatcaataaactcatcgcgatctacatagtaaaatgagaaatcactatatttctcttctacttctggcataaatgggtctacaaagcggcagtctgggcaccattctgctgagaacataaagactacattctcttcattttttaactgttggaattgctccatgctttctaatgacttcatctatatttcctcctctaacgggtacatttttcatgttataatctttcttttatactaccatacatcgcgcacggtgcaaggtttatgcttgctttttgtcatacttatattgcccaactaacaacttaacaacgtgtacaaataattccgtacggtcgacataatcatctgtaaaaataccgatcgcaccttcgtgactacgaatatcttttcgctgcacaaactcttccatcacttcgcttaattccttaccatcttcaagaggtgctaaaaaatcgtctggtaacgtaatacgcgctcctccggccacaaatactttcccatcacttgttgctagcgcgccccagttacacataaataaaccgtgctccgttttcattacgccgccttctagcccaatcccaattggagcttctccgtcctctagcgctcgcttcgctctattgatcgctccttgcatcgtctcttcatctgagaaaggctgagctgatactcctgacggaacagaaagagatgtaatttcagcatctttccaaaccttctccacagcgccaaccttcgttttattcttcgatccaactactactttcatttcgttcacctctataaaaattcatcattctattctaatatccgcttcggcacaaattaagtaccaaccactaccacacaccatcagggaattccttctccccataaaagaaggtcgctttctaaaatattactggtcctaaacacaaaaacaggcttcttctttcttcctacccgcggtcttaatacatcattcgagcacccattaggcactaaccgccaccactcatcgctgggtcatctattcaacctaaaaaaagaagggtttttcgcccttcttctctacgcgttattcttaattgtctctaacgtcgttttatctgttgttcttacaagcttcgtaattaattctttcgccgctgcataatcatcaacatgtaaaattgaagcatgtgtatgaacgtagcgtgcacaaacaccaattactgctgatgggataccagagttacttgtatgtacacggcccgcatctgtaccaccttgtgaaataaagtattggtacggaatgttgtttgtttctgctgtatctaaaataaattcgcgtattcctctatgtgttaccatcgtgcgatcgtagatacgaagaagagcaccttttcctaattgaccgaactgtgttttgtcaccagatgcatcgtttgctggacttgcatcaagcgcatagaaaatgtctggttgaatcatatttgcagctgtttgcgctccgcggaggcctacttcttcttgtacagtagcaccagaatataatgtatttggtaatgtttcatcttttaattcttttaacaattcgattgcaagaccacatccgtaacggttgtcccaagctttcgccataattttcttttcgtttgccatcggcgtgaatgggcaaatcggcacgatttgttgtcctggttttacaccaatttcaatcgcgtcttcataactatctgcacctatatcaattaacatattttttatatccatcggttttgcacgttgcgcgtcacttaataaatgaggaggaatagaaccaacaaccccaataacaggaccattcttcgtcataacttgtacacgctgtgctaataaaacttgactccaccatccgcctaacgtttgaaaacgaagcattccgtttttcgtaatttgcgtaatcatgaaacctacttcatccatatgacctgctacaagaacacgcggaccagtttcgtccccttttttcagaccaaatacgctacctaaaccgtcttgtacaatttcatccgcatatttgcttaattcttgtttcataaaacggcgtacatcatgttcaaaacctgatgcaccttgtaattctgttaacgtacgaaataattgtaatgtctctttattcacgaagtccccttctttcaaaccttagtagaatacctcttttattgtaacgaaattttcgaaatgtttctagtttcttcttttttagctgtatttgctttataattattatcggtacactatttttattttatagaattgaggtgaatatatgagctggaaaggtttagtagcaggtcttggcgttgggttcgcagctggttatctcgttgcaaacaaagtacaagaacaatcccatatttcttcagaaaaagcattgaaaatggtgaaacaagcattaagtcataaaggtgaaattactggctcttgggtacatatggttccagagacatttgaaaaatatgatgtcgcatatgaagtttatcgcggcggtcttacaacaatgttaaatgatatacaagaacgatttgaatttttagttgatgctaaaacaggtactgttttagaggttatagcagcataaaaaggagggttcccattaggtgaacctcttatttttttgaaattgcgggtattgattaaaattatatcagcgattttccgaatatatcggcgcaactcaatttatatcagcgatttcccaattatatcggcgcaactcaatttatatcagcgtttgtttaaatatatcgacttaccgacaaaacccgacaataaaaaagaggctgctccaataaatatgatggaacaacctcctatttttatgcttctatactcgttttccgttctactttttctacgatatgcccttcctcattccacttcacagcgcgataatatgcgtcatggtaaaacgtaaaccatgcctctttttcagcaccatacttcatccacttttgtttattttcaatcgaggtcatcggataatcgtcgtatgccattacccataatacattttgatgtgcgtgcgtcggtaataggtctgctaaatgaagcatcgtttccccatggctttctaaagcaataactgcatgtccatcactatgaccacctgtatgcaccatttttatttcatctgtaatttctatttcttgctggaacgtaacaacttgatctacaatcggctcccaattttccttccaatatgtattacgggatctaatatttgggttcctcatttcattccactctgtttcacttacgtaaactttcgcgttcggaaacgctggtacaaggtgatcaccttcccattttgttaaaccagatgcatgatcaaaatgaaggtgcgtcattaaaacatagtgaatatcttctggctttaatcctagtttttctaatgattcataaaccgatgattcttctgttacaccttgattccgcttcatcttctcattcaatttaccgtttcctattccggaatcaatgagcatatttccgtctttcgtttgcaaaagtaacggatctgttcgtaaataaatatgatttgtatcattatgtttatacttacgtgaccaaagtactttcggcacaacaccaaacatcgctcccccgtctaaatgtgtattcccgccttttaaccacgttacttttatatctccaatttgtaactgttccattacacatccccctttcaattaatcttaacataaaattctgattattttagatgtaaaaaaacctatgcattactgcataggctctgtacgatattttgcttcaactcggtaaatacgatgacctttactagagaatttctcttcgtattcagtcatgatgttaccttcaaagtcgctgttatgaagatctaagcttaagtacgttagtaacataccatactcagccatactcataagagaatattcaaatagaccttggttatctgttttgaaatgaatttctccgccttctactaacacttcttcgtaattacgtaaaaatgttttatacgttaaacgacgcttcgtatgacgtttctttggccatggatctgagaagtttaaataaacgcgatcaatttcacctttcgcaaagaaaactgttaaatcttcagcatctttattaattaactttaagtttggtaattcttcttcaattaatttatcaagtgcatctacaacaacacttgtgaatttttcaattccaatataattaatatgtggattcgcttttgccatatcatacatgaagcggccacgacctgtacctacttcaatgtgaattggttgttcgtttccaaatacttctttccagctaccagcgcgctcctctgggtttccgattacgatatgtgaatattcattaattcgatccattgcatacggtttatgtcttaaacgcatagatgtttccctctctttacatagctattttaaaggaataattccttctttcttttttaatcaatctaccaaacaaaaaaccaagtacgtacgagcactcggtccgtttctttcaagtataagatgtaccattttgataaaaactacatacagcattaaacattccatgacgaaacagctttttctcttacatttgaagagaaaaacaatcgaaaggatgatccgttcatgccaattaatcaacaacatcaattagaagtgctgaaagatattttagtcaaccaccaaagtgattgctgcgggacagtttcagaatgcgagcaattagagcgcctcattcaatcgttactcgcaaacgataatataagtagtgacgctaaaacaatgctaaacgatgtatattcttatagtcaatcgggtaaatcttcctctaatttggacaaccatatttccaataatcaagaacaacttactcagtggattgctggaatggacaatttttcttaagtattattctgaagcaagtagttgctgtaaatattgatgccaatattcagcttctgcttgctgtttttttgttgtatgccattgaatagacaaaatcgtttgtgctatcacataccatctcatacgcctaagcagcgattcatccatttcaatatcataataaccgagccactcactccactcctggcgcggaatgtaccaatataataacataccgaggtctagagctgggtcagcaattacagctccatcccaatcaattaaaaacaattcatcttcatccgacaatagccagttgttatggtttacatcacaatggcatacaacgaattcattgtattcaatagcttttaatgaatccattaaatattgaaggccttgctgaattgtttcatcatcccttatatctcctcttaaaacgagttgcagttgttgtaataactcttgtgcgtgaagcggctgcttcccaagtctttgaatcatctgtacaagcgctttagaggagtgtattttctttaaaagtttcgcaacacgttctagtttcatatcctctggctctagcttctgtcccggaagccatttttgagcagaaattacatcaccattcgttacccttcttgtccaaagtaattttggaacaattccttctgctgacaataccgctaaaaagggcgatgtattccgctttaaaaataacttctgttgtccgttttgcgcaatatatgcatcgcccgttactccaccagccggtacaagactccactcttttcctaataattgttccaaccattccatattcattacccgttaacaaatccttatcttttatagttatgaaaagaaaaaccgcaacatttctacacatgttgtggattcatatattttactgtaaatgaaaagaaaaattagcctaagccaaaaatcctctattttattttacaaaacctgtcatagaatgacaacttatcaaaatcgtcacctttgtcaattctacatttattacattctcatcgtcaagtagcgatttgtcacattatcgtcaatatatacgtgctaattggagcgagcctaagttcctttcctctaaatgaagaaattggctctattttcgcttcgttttcgtttactaacacatgccacgttgcttctttcggaagttgcacagttttagcttctaaaccgctattaaataagacgataatctctttccacggcccaaacgattctgcatgctctaggtgatatgcaagtacttctgtagatgtttgtaaaaaagtcatatgtttttttataaggtctgcattttgtaatcggaatgccccatgctctttacgaatcgcaattaaaccttttatatagttaacggtctctatctctttctctttttgatcccaatctaattgattgatctcatcatttgcattataactattttcatttcctttcttcgtacgataaaactcttgccctgcgtgtaagaaaggaatgccttgtgaaagaataaccattgcgctcgctaataggtgacgttttttcaaaatcgtttctgattcttcattactgcgcactagtttatcccacatcgtcatattatcatgacattctacatagttaatgctttgcgccggctctaaaaacagccctgtttctttcatacttaaaagacttcctgctgcaatatactgcaaatgattacagtctacatgcccaccaaatgcaaaaccacgcttatttatatgaaatgtactcccttttatcccatcacgaaattgatcattaaactgcgcgatatgtggcattttcttcgcattatttaacgttgctttttcctcaagaggaagcggtgtttgtaaatcccatccttctcctaataacaaagcatctcgttttatgtttcgcacttctttctctatcatattcattgtatcaacatctaaaattcccattaagtcgaatcggaatccatcgacattgtattcagtaagccaatataaaatagactctacaatgaatttcctcatcattttccgttcagacgctacatcatttccgactcccgtcccattagaaggcataccatcttcaccatgacgaaaataatatcctggaacaagcttctcaaatgatgatagctctctttcataaacatgattatatacaacatctataatcaccctaataccttgttcatgaaatgtttcaattagttgtttgcactcaactatcctgttatacggatcagaggggtttgtagcataaaatcctgttggtgcattgtaatataatggattatatccccaattataggcggacgaaggattcgcctcatctacaccaccgaaacaatataaaggtaataattcaacatgcgtaacgcctaaatcttttatatgagacaaacctgtcaatgtcccatttcgtcctgttgttccttcttccattagccctttatacgtcccttttttactcactccactgttcggatgaatagtagcatcacgaatatgcaattcatacaatatggcatctgtcattgcttgtaatggtggtaattgctctcgtttcgttacagtcgtcttttctaaatcgataacaatgccatactttccatttacagtcactgactttgcgtaaggatccaccgcttcgttccatattaaattaatacaaacaagaaatgtatagcgtgctccgtctaaatcaccttgtaatgtttgaatccaaactccgttttctcccctgtacatttcatgatcggtatattctttatcactcttataaattcttactttcgcaagccttgcagttggggcccatactttaaatgtcgtttcttgtttttgatacacagcacctaaatctgtaccttcgtaataatacttttcatcgaaaatttttgttcgaataacagcacctatttgtaaatcagtttcttcattccgttcatctcgtactgtataatacttccccacatctagcggctcttctataaagcactcatacttcgttgcatctggaagcgcaatagtatgagcaatcggtaaatctttcacattacttccttcttgcaaacgaaatgtccgacttgttccatacgcatgtgggagcaaaattgtaattttattcatttcatctaaataggcatcaaatggacgttttactttcaacataaaaaaatcaccatcattctcaaagttaaaataaagtgaaactttaatgagcgagaaaatttttccatcctcacttattattagccttcaccaattaggcgagataaaatgagctgcaaatgataaggcttttcttatcaacaagactctatacagtaactccattcttctctatagtatattcacctgcataaaaaacgttttcaacattctatttttgtaattttatttcagcaatcgatttatacttcggggtttctttcacgtgggattcgtataaagtaattgtatctgcttgaaatgatatttcaggcacttcttttatactttctaaacgaaacttttcttctcctatccatttacgagcaacggtaatatgcaggtgatacgggcgtatttctagagaaaatccattttcttcacaaatggcatgtacttgcttttgcaactgaaacaaatcgtgattctcacttaccttcgcccaaaaaatacggggctgattttccctaccaaacgttgaaaaaccttgtaacgtgaacgatagttcttttgtttctgcaactgtttgtaatccattttttattccctctaattgttcctccgttgcactccctaaaaatgaaagggtaatatgatagtcttctttatgtacccatgaacgaaattgtaattcctcttgcatgtcctttttatagttatacagcatttcttttatatgattcggtaacgtaattgcgacaaaataatgcagttccatgtacatcttctccttctttctattgttgcttttctttcttatctcattcaggtaaaaagaagccgctctccaaaatagagagcggacattatttatatatccattacttcgctaattcatgaattgcttgcgcgtaaattgctgttgcttttaataagtcttcaatttcgatatactcatctttttgatgtgcaagttcttcttttccagggaatagcgggccaaatgccacaccagcttttaatgaacgagcataagtaccgccgccgattgctaatagttctgctttttcacctgtttgttcttcatacacacgttgtaacgtacggattaatacgtgatctttatcgacgtgatgtgggcgagaattagaatagtcagccacttcaaaaccatgcgtaccaacatattctttcaacttcacaattgtttcttcaaagttagttgtaactgggtaacgtacgtttagccctaagttaccaccgttttctttcgtataagaaatgcgaccgacattcactgttaacggaccgctaatttcatctttataagcaatagtagctttttcaccaaaaatatcaccagtaaatgtttctgttgcaaatgtcgcaaatgcagttgcttttccatcaagtgaaactgtagttaagaagtttgctaataataaacctgcattttctcctttttcaggagtagatccgtgcgctgaaattccttctatttgcaacgtcactgcatttccttctatagtcgatttccctatttttttagcagtttgtaaatactcttcatatgctactgtaagtgcatttacatcttctcctgtaataaccgcttctgcaaaatcaggaaccatatttaaacggcgccctgaatcaaatgaaacaagttcatatgtaccttttttctcttcactaccattttgcacaacttgtatgtcagaaattcctttttctgcattaataattggaaagtctgcatctggtgcaaaaccgattgttggcatttcttcatttttaaagtagtgatctacacatttccaattactttcctcatctgttcctataatcatacgaacacgtttggaaagaggtaagcctaattctttcacaattttcatcgcataatatgctgccatcgttgggcctttatcgtcaattgcaccacgtgcaaaaatctttccatcgcgaatatccgcactatatgcaggagtcgtccagccatctccttctggtacaacatcaacgtgacaaagaatgcctactaactcttctccttgtcccatttcaagatgacctgcatatccttctaaatttttagaagcaaaaccttcagtttctcctttatgtaacatgaaagataaagctttttctacaccttcaccgaatggtgcgccctctttcgccgattcttcttcccatacacttttaatttgtaaaaattgttgtgtatcacgaattaaatcatcttttcgtttcgcaacttcttctgtccaattaattgctgacatcacgcatccatccttcactatattgtttctttcatcataacaaaccgaaatctcttatgccatacacgaaaactaaataccgaacaattgtaatatttcagatatttcttattagtttttcttttattttttcaaaaaaatttgcaggaatttggcgttttacgtagaattttatgtgttagttgactgaccatatatacaatgtcaactaccaatatttttctatatgaatatttgttaaatttctgtaaaatttaagtagattaaagcatgaattttatcatgtagagtacaatggtagtaacgaccttctttcctgaatggggtcaaaaaaactagtagaggagtggttttctcttgaaacctacaactactcgtatgctaacacgcattaaatcaatttatatgtacatcaatgaaaacggaacggtaacgacgaaagaccttgtagatgagttcgggatcacaccgcgaacgatacaacgtgatctaaatgtgttgcagtttaatgaactcgtgtatagcccttgccgcggtaagtggacaacaacaggaaagaaagtgagaatgacctcataatgaaaaataattgtatgtaaataaatacatacccctttctaataattagaaaggggtcttttctgcgcctataaaggtactacttttcagtatctacttgatatgtttttaacatttctacttcttcatctgttagctctcggtattgtccaagttctagttcttcatctaatactaacggacccatctctgttctctttaggtagactacttttttccctaccgcttcaaacatacgcttcacttgatggaatttcccttccgtaatcacaagctcaatttcagaaatatcatcgcttttcaatattgtaagtgcacctggcttcgtttcatagccatcatctaaaataacacctttagcaaactcttttacatcctcttctgttactactcctgcaacgtgtgcataatattttttcggcacatgctttttcggagataataattgatgtgataacttcccatcatttgttatcaataagaaaccttccgtatcgatatcaagtcgtccaactgggaacggatcaaagattgcatcttctaattctaataaatctattactgtttcatgattatcatcttccgtcgctgaaataacaccttgtggtttatgcatcattaagtaaacaaattctttgtattccacaacttcaccgtgaatcataacttcttgctcttctacatttacatgaactttcgcatcttttactggcgttccatcaattttcacaacgccgtctttcaataatttctttacttcttttctacttccatatcccatatttgctaataatttatctaatctcacgtttttcaccttctttatttatcatagaaaagggggacgtaattacgcccctcttgatttcaactttattttaaatctactaccaagtttacgttgaattttatctaatgcttctccgccaaatactctttcaagtactcctgtgcgaattgctaacaatccgtaaacaagaccgccaatacctgcacaaattgcaactgttataagagcaccaatacggccatcaggcgaaatcatgaaggatagaagccattgtgatagttttacagcaacgaccattataagtgttagtactgcaatttggaatgttcttttatatacaacaccgaatgaatagtgtgcgtattttttaatttgttgatttgtgtaccaaacagaagctaagaaaccaactgctgttgctagaattgctcctactgtaccgaaataacgaataaagattacgttacatacaaatttcaaaataacgcccattataagcgcaataatcgcatgcttctgctggttaataccttgcaggattgccgctgttactgtaaataaagcgaataacaacgcaactggtgcataccacattaatacttgtccacctagtggatctgaatcgtaaaacgcagtataaattggatatgccagtgaagaaataccgacaactgctggcaatgttaaaaacatattcgcctggaatgtttgtgtaatttgcaatttcaaatagcggtattgtttttcagtaaatgattttgtaattgctggtacaagcgttaaactaaacgctgttgcaagtgatacaggaatcataattaacttatgcgtccacattgtgaaaataccgagagctcgctctgcgatatcaccttgaccaatcgcctgcataattgagttaaatgtcaatgtatcaatttgttgatataaaggaattgttaacccaattacaacgtaaggaatcgcatatgcaaataactctttaaacaattgaacggtgcttactgttgattctggtacagtttgttcaattagatattgatccaaatattttttacgttttaaccagtaccaaattaacacaccgagtgctccaaccgctgaaacgaacgcagcaaatgtcgctactccaactgctgttgcaactgtaccgccaagtactttaataacgataaaactacctgctaataaaaagacgatacgaataatttgttcaataatttgtgaaacggtagttggtcccatagactggtgaccttggaaataaccacgaattaaactcgctgctggtacaacaataagtgcgaaacttacaagacgaataatcgtcgtaacttctcctacattattgtgtatactttgtttaccaagcatcgcttctgcaaacaatggcgccgtcatgtacagtactaggaacgaaagaactcctgttactatcatcataaccattcccgagcggaacattctccggctcgttttataatcgccaagcgcattatatttggaaacaaattttgaaacagcaagtggcacacctgccgttgcgatacttaaaaagatcgtatatggaatgtatccatatgtatagagcgttccgccttctgttcctactaatgcatgaaacggaaagacgtaaatcatgcctaagaactttactaaaaatgtccctagcgtaacaataagcgttccgcgcagaaatttcgaatcggacatacaaaaatcctcctacatctacataaagtgaaactataattagttggagacttctctcctactccttattagttgaaccattcgagcatttacaggctaacagactccctatttacttctcctaaatcttgaggttttagtcttatcgcctacaaatggcaggatagtgctgaactctaacttttgtattgtaccacaattctctcattaagcagtacttcactctatttttcttttaagggaaaacatgctattcttttaggcaggaaatgtagaaaatgaggtcgatatattatgcattatgatgttattgtcatcggcggcggtccttctgggctaatggctgcaattggtgctgcagaagaaggcgcaaatgtcttacttcttgataaaggaaataaacttgggcgtaaacttgcaatttctggtggcggacgctgtaacgtaacgaaccgtctaccacttgatgaaattgttaaacatataccaggaaacggtcgcttcttatacagcgctttttctatttttaataatgaagatattattacattcttcgaaaatcttggtgttaaattgaaagaagaagaccacggtcgcatgttccctgtgtcaaacaaagcacaatctgttgtagacgcacttttaacacgattaaaagacttaggtgtaaaaattcgtacaaatacgcctgttgaaacgattgaatatgaaaatggtcaaacgaaagcagttatactgcaaacaggtgaagtgttagaaacaaatcacgtcgttatcgctgttggcggaaaatcagttcctcaaactggatctactggagacggatatgcttgggctgaaaaagcgggtcatacaatcacagaattattcccaacagaagtacctatcctttcaaacgagccgtttatacgtgaccgctcattacaaggccttgctttacgtgatataaacttaagtgtattaaacccgaaaggaaaagctatcatttctcacaaaatggacatgctcttcactcatttcggcctatccggacccgctgctcttcgctgtagtcaattcgtcgtgaaagcactgaaaaagtttaaaacgaatacaatacaaatgagtattgatgcattgccagaggaaaatagtgagcaactatttcagcgcatgctgaaacaaatgaaagaagatccgaaaaaaggaattaaaaacgttttaaaaggttatgttcctgaacgttacttcctattcttattagaaaaaaatgaaattgacggtagcgaacaagctggacaagtttctcacgaaaagattcgtgcacttgtgaaagactttaaagagtttactgtgaatgtaaatggtacgcagtcaattgaaaaagcattcgttactggcggcggtgtatccgtgaaagaaattaacccgaaagaaatgtcttctaaatttacgaacggcttatatttctgcggagaagttcttgatattcacggttatactggtggctataatattacatcagcccttgttactggtagaattgccggaacgacagctggagaaaacgcgaaaatgcagtattaaaaaaagaaacagggattcctgtttctttttttataggtacatgaaattatatgagcaattccacaaatatatcagcgattccgcaacttatatcggcgattccccaaatttatcagcgattctgcaacttatatcggcgattttccaaatttatcgacttaccgagaagaaacgacaaatatctgctccatgtaactttccattgcttttttgttgctttatttaccttagtacctttatattttatattgttgaatatttaaaaaagggtaaggggaaaacaaatgagaaaaaaagtcatgatgtctttaatgttaatgacgtttctttctgcggtagaaggaacgattgttagtacagcaatccctcgtataacgagtgatttgtcaggcgtcgaacttgttagttgggtatatgcaatttatatgcttgcaacagctgtttcgactccaatatacggaaagctcgctgatttatttggccgtaaaaaagttttactgatcggagctacaatctttttagtcggttctgcactttgcggagtcgttacatcgatggaacaattaatctttttccgcgcgcttcaaggtatcggtgctggtgctgttatgccaatcacaatgacgattattggagacttatatagcgaagcgaaagaccgcgcgaaagcacaaggttggatgagtgccgtttggggtgtatccggtgttatcggaccgttagtaggtggatttttagttgattccctttcttggcgctatattttcttcctaaacgttccattcggaattatcgcttgcttaatgattgcaatttactacaaagaatctattaaagctgctaagcatcatatcgattatcttggtgcaacagtcttctcattaagtacaatcgctctactatatgcattattaacaggtagcagtaagcaaaactggggagacatgacaattatcggcctattaatctttgccgcgatttcatttattattttcttattcatcgagaaaaaatctccagaaccattaattccgctagcacttttctctaaccgcacattatctacgataaatatattaactcttattgctggcgcaatgattattagtattacaatgtaccttccaatttggagccaaggtgtattagggaaaaatgctacagaagctggacttattttaatgccaatccctgttatgtggacatttggcgctattttctctggtaacttagtaggcaaattaaaaacgaaacaaatcattttacttggagctagcattttatcagtcgctacgttcttattatttacactatcaacaaattcaccatcgttccttatttatgtagcagtcggattattcggcttaggaatggggcttgtgacaccgatttacatggtaacaattcaagcagccgtaccagctcatacacgcggaacagccgttggtttaaacacatttattaatacattcagtcaaacgttaggtgctgcaatctttggaacaatctttaatacgatgattcatgcacgcggcattaaaaaccttgatcttgtatctggtggacacggcgggactacagcaagtgtagccactgaatcacaatccgcattagctgcaagtgtacacgttatttatatgagcactttcgtattagcagtatgtacattaattatcggttggcttttattaaagccagctacacaaacaagtgagcaacaataaaaaggatgaccattttggtcatcctttttttattcttcattctccacaatatgtttcagcatggataatttattatcccaaaaacgttcataatatgagagccactgttgtaattcttctaatggttctggatgcaaacgatatatcttctctcttccgctttttcttccacttactaaattcgcttccgaaagaatatgaaggtgctttacaaccgcagtacgactcatcggaaaatgatccgttattttggaaatcggtaactctttgtcacttaataaccgtattacttctcggcgggttggatcagcaattgcttgaaatacatcatatttcgctgctgacgaggacacttagccttcgacaacctttttcagtttttcatttacaattgctacccaaccaccgctcattctatcgcgaataatagagctcttcgcatttgctttcggaagaatttcatcaggatgtttccagccgccgtgaattaacgtaaattctgttttgttatctcctaagtctttcaaaataaatgaaacaacccagccatctgtatcccatgagaaagacaaatggtttggctcatcaatttctaacactttacatggtgatggcccaaatggtgattgcacatgaaattcatgtcctacctctaatacaaaatcatttggcataaaccatgacgcaatcccttctgcagttgatactacactccataccttttgaatagacgcgttaaaaacgattgtttgtttaatatcatttaatgtattttgttgttccattttcattctcctttactcggcgttacaacataacaccttttggttatacttcgataatataacaccttttagtttcatgtcaacgccaattcttttactgttgagaaattctcaacattttttcaacaggacaaacaccctcttagcattccctcataatatactcacaaaggcaatacaaaataaaaacttctctcaacatgaaactccatcattcatattgaaagaagcgccttacttatatcatgcgtacttcgtctctcctccttccctcaagggacaatacgcgagatatgacaaatcagaaggaatatgcccaccatttgagtaggtagttatttctcttctcctcaacatttcctcaggagcgaaatgactaccgactcacttttttcaaacaaaaataaaaaggggatgaaagctatgttctattgcattaactgttctgatattcatcatgaaaaacatccgaatgataaagtattcaaaaacggtttttatattgatccatttttaggtgatcgttatcaccttggtatgtgtaaagatgcccaaaatcatgaaacaggggagcctcttttaacgacaaagaaattaggcacaccccaatctattatgaacgtattaccgacacatgttgtcccaacataaaacataaaaaagagctgggtgagccagctcttttttatgctttataaacgatcattgctgaaaaacaataaatttggttttcatcgtcgttaatggaaacaccaacttgatacttaatatctacaaagttgctatcatcaatctttttcaaaaacacattcacagcgtcttctaagtctttttcgtgactttcatcaaacactttcacacgaatcatgttaacaccatcctagatcgcagccctccgccgcttgattattgccacggtgcgtatctatgatgcgataaaactttccattctcatatatatatccgtcttctaacacatattttttatcttcagtatagacataaaacttacctatcataaatttactcgtatataattccaaataatttggtctaaatttagctacaactttatttgtaatatcaatttttattgtgcgccccaccttctctccctcctttgcaaagaacggatttaggtatattgtattagcgcttttacattttatgcttaaaaataagtggatatgccctctttctcacctgtactatttttctaaaaaaatcactataaagtgaaactttaatcagcccgaccacccacctaacttctttgctttcgctgaattttgaggtgggggtcttattgcccgttaatgcgggataaataagttcaaaaaaaaacataaaaaagcactttatcttattgactcgaatataaatattatgttatcatataaaatttgacatttttacatacgtatgctatcattaaaagtggttaccacatatggaggtggatgatttgtttcaaattggtgataaaatcgtttatccaatgcacggtgcaggaatcatcgaagcaattgaagagaaagaaatattaggtacttcacgtcaatattgtgtgatacgcatcattagtaaagatatgcaagtaatgcttccgatggatcaattaaaaaaatcaggtattcgttatatcgttgatcgaggtacgttagatgatatacttcttgaatttcaaaacggggagtcagacccatcactctcatggaaacaaagatatacaatgaatatggaaaaaatgaaaaatggcaatttacaagatagcgcagaagtggttcgggatttacttcgccgtaataaagagagaacattaaatgcgagcgaaaaacaaatgctagataatgcacgaaaaatgatgatcagcgaagtcgcgctcgtacaaaatgttactgaacatcaagcaacagaatttcttcaagatacaattaatcactaaatttaaaatagctggccgctatttttttttgtaaaaaaaggacgaagagttttatctcttcgtccttttatattacccacgcccagcttgaaacgatggatataacgtcattccaccatctgcaaatagcgtaattcccgttacgtaactcgcctctgatgaagcaagccaagttgctactgctgcgatttcttcaggttttccaatatagcccataggtatcatactttctacgtcagcacgttttttaggatcagcaaacttttctgcattgattggcgtattaattgcacctggtcctatattatttactcgaataccttttggcgcatattctagcgctaacgtttctgtcatcagtttaatgccacccttacttgctgcatagtgcacaaatagtggccacggaattttctcatgaacactagacatattaatgacagaccctttaatatcatgttctacaaaatatttaatcgcttcacgacttcctaaaaaagcacctgttaaatttgtattaattaccctattccaatcttcaagcggcatttcatgcgacggtaccgcgttttctatccctgcattattaatcataacgtcaagcgtaccaaactctttcacagcagattgaatgagattcacaacatctgattcgacggttacatcaccttttacagcaatcgcttcgccgcctacctttttaatttcttctaacacatcattcgcttctgattctcgtgagcgataattaataaccactttcgctttttccttagcaaacctcactcccatcgctcttccgagaccagttgctgatcctgtaataacgacaactttccctgctaaatcactatacatttccatacctcctttaacttttggctatacctaacataattccggctgcgataataaaaacgataccgacaacgatacccgttaattgacgtttcgttttcttttcacctaatataaggatcccaccaagcgtggaaataataattcccatttgcgatagcgagaaacttgttgcaactccaacacgcggctgtgaaatgaataaaaacatatttccagctgcccaaattaatcctggaataatattgcgaattgcatatttattaaatggatgatgtttaaaggtaagcaaaatcccacctaacaccataccaactgcttgtggcaacaaagccgaccagccatctacgttaaataacctaattactactacgtaaactaaataaccgactgttgaaattaataaaattacgatacctcttttaaagtttgctgcttgctctgcattcttttcttcttcactttgaagcgatgttaaaataacaccgataataatacaaacgagcgctaaaatcccaaggacgaccgatattgtcgtggaccattcatgaaatacgataacgccaaataaagtcgtcgcgactaattgaagtcctgttgaaattggcatcgtcctcgaaacacccattaaatcaatacttttcaattgatttgcctgaccaagcgcccaaaataaacctgacacaactccaactccgataacggtaggtgttaatactggcttcataaaaatataaacaacaattgagaaaataagtgctccaaacgttgttccgagcgtttgactatacgggcccccgcccagttttacgttaaatagcacaatacttccccaaaatatagctggtaaaatcgctaaaaatatatccatcactcattacctttctttactaaatgccatagattatcactctaagtcgttagagtgagcttttattttttctttttcccgttcacaaactttttctgcaataacgtcagaaacattcttttctcgctccactttctttatctttacgtgatctaaatggtcttccaaagtaagcgtaactttatcgttcggcggattatgcgctccttgaaatgtaagaaattgtagcttcacttcgtatctaggaacaaattcatctttcttgccgagacgctttatatctataactgaagcacattcatattgatcttctgtcacttgtctaataactgaatagtacctatttgataatgcactctctaaaagctgttctcttgattctttcgcgaaagaatcgcttggagaagagaaaaaggccacacatagcattgtgataactacacatatttttttcatagttccctccttgttctatagattagtgttctcaaaactgccataaaaaaacgactttccctatgtaggaaagtcgttttaatgaatccaatattaaccaccgctcactggtggaattagtgcaacaacatcaccagattggaccctgtcatcttcatttgcgtattcttcattaatcgcaaccataattggctctgaaactggtacattatattcgttcgcaacaacatcttttaactgtgcaaccgtaatattttctttctctatttgtaattcacttgtccctgcttcttcttgcaagtgcgcaaataacaatactctaatcatacttatagctccttcccaggctctcccgccggatatggtgttttttctaattgatcaccaatccatgagtcaccatcttcccaaaactcctttttccaaatcggaacaatttgttttatgcgttccataatatattcgttcgcttcataagccgctttacggtgtggtgttgaaacagcaacaacaaccgctatatcagaaatttgcaacgtaccgatgcgatgtgtaatcgcaacatatgtacctggccatttctctttcacttccaagccaattttctctagcatcttttctgccatcgtcttataagcaacatactctaagtataatgtacgacgccctttcgtaaactctctaaccgttccaataaatgttgtaacagcaccgcattcacgtcgaattactttcttcgttacttcttcaattgagatttctgtatcaattacttcataatatgtatttatcatttcgcactcctaaccgtttgtaaaaaccagtctatgtacaactcttcttctgttatatgaaatactttatattcttctcgtatatttgccggaacatcataccacgtaataaccgccacaatattttctactttatgtaaaagctcaatgtcttccgcagaacgaagtaacactactttcgagtaattctcttttttatagccttctattaaaattgtatccacttcaaaaaactcatataagcgaataatttcttgcaaggaccatttctttcttagtgaagaaagtgaaagcaatccagcaccttctacactacttacgacagcaccagctttacggtgtctttcgctatctttttgcgctacttctggaaagcctccgtgcccgtgatgtttaattgtagcaactttcatttttcgttcagctaatgcatgcaccactttctcaacaagtgttgttttcccgctattttgatatcctactatttgtaagattgaagtggctttgcccatggccaatcacatccctcagagtgctctaacaataatacggatactttcattccggtctcaaatcctctcgttcctccaggtaacacgataaaagcattcgcatctgcaagtgaagataccgcactcgatttatctaaaccaactggcatcgcttgtaacgccccgtccacaattgttacgttcgctcttacgaaacgagtaaatggatttggctttggaaaatctttttgtaaaatagcatccgctctatatacgtgaggttccttcgcatacaaatacgtttttataattggatgcacaaataattcaaagcctacataacaagcagacggatttcctgataaaccaaagagtaactttccatcaacttcagctactgtcgttacacttccgggcctcatggctatcttattaaagagtacatttgcctgtaacctttcataaatagctggtaagtagtcataatctcctactgatacaccgcctgttgtaattaaaatgtcgacctcatccaccgctgattgaacagctgtaaaacatgcatctaactcatccgcgagttgaccataataacgaactttcccgccagctttcataatttgagctgcgatcatatacgagttactatttctaattttccccggttctaacggctcatgtacttctaataattcacttcctgtcgttacaataccgacaacaggctgttttacaactttcacagtgctatatccaaacgttgctaataaggcggcaacacctggattaattgcaacgcctttctgaacgagaacttgattttgttttatatcttctcctttaaacgacacattgtcaccgttattaaaagggcgttttaacttcatatatgttttcccgttcttctcaaacccttctgtcagctctagcattacgactgcattgcaatcttttggaatagctgctcctgtcataatacgaaccacctgaaaagatcctacttcttctgtaaaaacagaacctgccccgatttctcctattacttcaaattcaactggattctcttgagttgcttctttcgtatcttctgctcgaatggcgaaaccatcgtaaggggaacgatcaaaatgaggaacgtcatgatctgagacaacatcttccccgagaattctcccgtaactttccgtaatagaaatttcttctacttcaccatgctttgcatatttcattacccgttctactgcctcagcaacttgaattggaattcgtttttctaccatcgtttctcacctcatatttgcaattttttttatctcgattaaactttatatattcaatagaaattacttcaaggaggaattccatgtcttcatttacacactttaatgaccaaggacgcgcgaagatggttgatataagtgacaaaaaagcaaccgttcgaacagcaattgcgtgctctagcattgtcgttacgaaagaaatttacgataaaatctctcacaatgaaattgggaaaggtgacgtattagcagttgcgcaaatcgcaggcattatggctgcgaaacgaacttctgatattatcccaatgtgccatcctttactattaaaaggtgttgacgtttctttcgattggaaacaatcagaagaacaatatcgtttactcattgaagtaaaagttaaaacagaaggtagcaccggtgttgaaatggaagctttaacagctgcttcggctaccgctcttactgtgtatgatatgtgtaaagctgtcgataaaggtatgattatcggcgaaacgtacttacttgaaaaaacaggcggaaaaagtggagattatacgagaaattcataatcctttctccgttgaacctaaaggattccctttaggttcaacctatatatcttgcatataaacttttcgctacatttatatcattcgtcccatgaatgaaagctctgccatctgtaaataaaacaaaacgatattcttctaccggaaacgacaataaataaggtgtcgcctttatctctacgcttctttgtaagcgctttttaatttcttccaaattaaaattcttccgcacacctggacgaatttgcactgtatttcgcccacataacacttctgttttcgtttgtgcttcaaatgttaaactcggatatgtacgtaaccttccgcaagataaacaagtatcttttttctgcctattcactttaaatgccatctgttgattattccaaagatcaaatgataacatcgtttcacgaagcgctccgtagtcttctactaatattttcagcgcttccgtagtttgatgcgcaactactaattgtactgccggttgtataataccagctgtgtcacatgttgctccgctcgccggatgctccattaaacagcgaaaacacggtgttttccctggtaaaattgtatacgttactccatagcttccaacgcacccaccatatatccacggaatattatacttttgtgaaatatcattaatgagaagacgcgtttcaaaattatctgtcgcatctaatattaaatctacatcattcactaattcttccatttcttgcaccgttacatctgtcacaaccggagttatttccacctcagaattaatcgctcttaaatgctctgctgccgctaccgccttcggtttatactgctttgcatcttcttctgtatatagttgttgtctttgtaaattactccattctacataatcacgatcagcaatcgttacttttccaacacccgctctaacaatcgcttctgcatttgccgcaccgagagcaccagcaccaataataagcacatgcttctctcttatttttctctgcccttcttctccaacaccagaaaataatatttgtcttgaatatcgctcctgcatgcgatagccccctttcttatcctcctatataagacatttcgatttttggacgattttttgcactttcttctgttcgttcatccgaatacctatcttttctattcatccatacatcttgtataacacttaataactcctcatccgaaagatttcctctaagaagttctcttacatccaaaccctctgtcgcaaataagcacgtataaaactttccatctgccgaaattctcgccctcgtacaagagacacaaaatgactcagaaacagatgtaataaaaccaacttcaacatttgttccaacgtaccgatatcgcttcgcaacttcaccaaagtaatgcgcttcagctggctcaagcggatacaccttatgaatcatctcaatcaattctcgttttgtaacgacttgatcaaaattccacccatttgtactaccaacatccataaactcaataaaccgaagcgtgattccttgctctttaaaatacgcagccatcggtagtacttgatgatcgttcatcccttttttcacaaccatatttacctttacttccaagcccgcctctttagctgctataattcccttaattaccggtttcgtattaatatttcgaccattaatattcttaaatatgtcatcatctatcgcatctaaactaacattcactctatgtaatccagcttcttttaatgccttcgcttgtttcgttaaatgaatagcatttgtcgttaaccctatatctattagcccatcaattttcacaagacgtgcaataagttttgttaaatctttacgaagcagtggctcaccgccagtaagtctaattttccgtacaccgatgctaacaaataattttgccaaacgctcaatttcatcaaaagttagtaaaaactcgtctttcaaaaaagcatattctggcccaaatatttccgctggcatacaatatgtacatctaaaattgcaacgatcaatgacagatatacgtaaatcttgaagtgggcgtccaaaaaaatctttaaccatctcctgcatcgccaccctccctttctgccaaatttctttcttttcattctattataatatattttcgaactgcgatgtttttgctcaagtgaataaagtgaaactttaaataattagaggggattcactccccctggttaacgaggtttacttacaaatacaaagataaaaaaaccttgaaacataaaagcttcaaggttctctgcttattaacttaatctaataatagtcagggtagcccctggcgttgctgtagataatgtagctattgcaactactccaaataactgtaagctaacagcagctccagcaggcaagttagcaattattgttgcactaaatgaaccagtagccactgtcggggcgtttatcgttcccgcaagcggactgccatttacagttatacgagaacttacaagtaatcctgccgttaaattaattgtataagctatataataatttcctgcattcgcaactgtaaatacagtatttccaccactaacggttattcctggaccaatattttgattgttcggtaatggtacattcgtaccacctaataaaacggaaatagcggttcctgatgtattattcgcaaatgcatacgttgcagttgtactaactccagtcaccccggtcgctcctgtggctccagctccggttggacctgtatctccagttggaccttgtgaaccggttgctcctgtagcccccgttggaccttggattccttgcgggccttgaattccttggggacctgtcgctccggttgctcctgtagctcccgttggaccttgaattccttgcgggccttggattccttggggaccttgaattccttggagacctgtcgctccggttgctcctgtagctcccgttggaccttgaattccttgcgggccttggattccttggggaccttgaattccttggcttcttgatgttgcctaacttttttcaaaatgtcctttacaaagggtacagattaatgtgatgcatctctttttcttactacttattgttttcatttcctatatattcaatagtttcttttaatagctcttcaaagttaataggataatcatgatctaagtcaggcacaactttatacttatgttctatatttttctctcttaatagttgtacaaattgctgcgtggattcgaaacaatcttcatcttgattcccgcatactatatatccttttatatgtttatccttcagcactcttagcaactcatcccattcttcaatctcgggaagccatggtgccataaaaacaaaaccatctacatttatatcttgttgtaaaatcgtatataaagctactctcgcccctgcagaaaaaccaccaatgattacactttctactgtatgattttctataaacttattgtaatgctcttttaattcctctttccctctctctatgtcctcccaaacaaatccatctgaaaactcaatttgtgaagactgtggtaaagctaacatataatcttgtatcaaaacagatttccaatatggttctactatttgtatattttcttggttaccatgcaatgtaagtagtagatttccctctttcttactgtatatatatttcacatctggtctttcctttttatgtgctaattcttctctttctttacataattgcaccattgtatgaaattcttcaaatttatgtagtgattttaaatcttcatcggaaattaaatactcatttccataccagaatcccttttctataatggcctctctcattaaatgtaatgcttctttttcaagtcccgatgcacttgcgagtgcatacttaaaattatatatttgcgcctcattccctattacacctgtagcgttttccattatataattgtacgcttcaaaacttcctttatttgcataacaacgtaacgtttcatttaataattgaatgtaagtcatactatttttcatgtaccaattcccccgcaactttttataatatttattttgcgaatctttataccactttgtataacccacgctaacaataccttattctcaaaatgatgcttaatagttgctcttccctgtccaatacatttagtataaataagaatagactgaaaaatcaatattttaacaaacaaaaaaagacaacaatatatgtattgttgttttcattacgtctacccactcttttgtttttttctatctggtttacttgaaactaaataatgtttttctgaaatatataagtctctttttaagctacgatttaagtaaggtcctaatttcattccacatatgaggcgatcttcgctaccttcaacaattgggaacatttctttttctgttacgtattgatctactgctttttgtacgacatcaatttctttcactaggtttaaattttctgctgtatgttcaaatacctcaagcgtttccttcgttatgagaaaaacatttgttggaaatgcaggtaaatatggttttaacaaatcataatttactgtataatcatcatttactaatactgtataaacgatattagcattcgtttctaaaaactgagccatcgcttgttctaattcatctttcgtaatttcccgctcttcttttccagttctgaaaaagcgaaacatcgcatcgcctcctttttactatattatagcataaaagaaaactgaaaaatcataaaaaaacccattgaaataatttttcaatgggtttctatatatttatcgttattttaagaatgcacttagcatccatacatgctgttctaatgttgtatgaattgctaacagcatgtcagctgatgtttcatcgccagcttcacccgcaacttccataccttcttttaattcttgaataagtgcagaataatcattcactaatgtttgcaccatttcttctgcagattctttgcttgtcccttcactgacactagatgttgcgagatattctttcattgtcgctaatggtttaccttctaaagctaaaatacgttctgctaactcatcaatatacgttccagcctcattataaaactcttcaaatttctcatgtaatgtaaagaagtgtggccctgtcacataccagtgataattatgtaatttaacatataacacattccagtttgctacctgcttgtttaatacttcaacaacatttgttttcgtactcatacaatcactcctcttatcattttgtaatgtttatcttttaataacttaattacattttaccatacattccctttcctttcgaacaattggcttatatgtaacaaagttttaacacctttaatgcttccctaatatcatttaattcatgtattttttcaaccacttcatacgtctaattgtccaagctcatacatatgcataatagtacatcaagctcatcatagtagaaagagggataacatggacaatcaacaatggcaagtagcaaagaaagtagctgctacttatatcggaactgtcgttggagctggatttgctactggacgagaaattgttgaatttttcacagtgaatggattatacgggacaattggcatatgtgtaagtggatttttttttatttggcttggcacaaagatgatgttactttcatcacaaatcggggcattttcagcgcaagaatttaacaaatatttatttggggatgtatttgggaatgttgtaaacacattattattactcgttttattcggcgtaacgagcgttatgttatcaggggctggtgcagtatttgaagagcaacttcgcttaccaagacaactcggtattctcattacagttatcgcttgtctcattataagtagccgcgggttacaaggtgtttttgaagtaaatacacttgtcgtacctattatgatgatttttattatcggacttgctattacaaccttttttcacggtacacctcctattaataacactattcctgcagagagctggaatatgaaatggattactagccctattacatatgtcgccttaaacctttctctcgcccaaagtgttctcgtcccattagccagtgaagtaaaggatcgaaaagccattttttggggtgggattttaggtggtgctggactttctttaattttattatgcagccatttagcaatcttatcagtcgatcaattttatcaatataacatcccaatggctgaagtcataagaagatttaatgcaacttttcacttcttcttcgttctcattattttcggtgaagttttcacaactttagttggtaatgtgttcggaatgacaaaacagatgcaatctattactgggtggaaaaatcacaatattattttcttcattttactaattagttattgctttagttacatcggttacagtgacttacttcacattctatatcctatcatcggatgggtaagtattgttatacttccaatcattgcgtttaaacaacttcaaaaaacataaaaaagcatccatgttattggatgcttttttatgttcattcacaatcatcacatacttcccagtacggtcccatttctaatgctaaatacggctttaactgcaaccgaatcattcgactaggcatgcgttctaaaacaaattgaataccttcttcatcttcgtctaattcaacttttgaaatcgtaattttttgcatagtcgtaatgggaattccatctttatataaagtgattttcacctcatcgtattcattaaaatacaattcgacactcatttgatttttcagtatttcatcaccaattttaaatgtatcattttgttcttggattatatatttccatccgcctctatcttctttcggagctgtttgaaataatgtctccaaatcctcgtatagcataagataacccctctcttactaaaaaacgatgagtattttatataccctttatctctatcactatccatagctattgtaccatatatcaccgttcttaccgtattcatttgcttcatacacacttataaaataactaattctatctccattattatgtatattacctcattactccatacactcttacaagttcaaataacgacagactttaatccatgcaaatattgtctactctccgcttttattagctcacagcattcacacttttacatatagtaagactaccacaaataaaaaaggagagtgacttataccactccccttaaaagaacttccctatagctgctaaaactaatacgattattaaaattgcaaataataatgagacaatgaaactaaaaataggtaacgctttcttttcattcttcttaaatagtaactttaaactaagaaaaatatttactggtacaagtataaaataaaaatatttaacaatttgcaccgagctattcgaaagtgtttttaatataaacacttcaattagaaaaacaataaaaaatgaaatacttagccaaaatgagacgtaactaagccaagaatgtctttttgtcccccaatacactcccataatactctccttttatttgtattctataggttaataattatacacaaagctaacaaacacctctatttttcgacaaatattatgcaaaataccattttaaacgtcataaaggaagtttacatctccatttgattttacataataaaacagactaccctctagtgtcataatgctactagggggagtctgttctctattaaactttaaatctctcaattaatacttgcaattcttcagccatttgagatagcgtacccgccgctgatccaatttcctccatcgaagctagctgttcttcagctgaagccgcaacattttgtgtgcttgtcgcattattttgtgctgtcattgcaatttgtcctactgaaatagatacttcatttgccccttttgacattccattagccgtttcaaccatcgtcttaatttgattagctatttcatttgtagattgtaaaatttcagcaaaattttgcttcgtttcatttgcaataacaagtccagattgaacttcttcatttacatgattcattgatttgactgtcttacccatatcgtcttgtatttcgcctattaatttactaatttcactggaagatatgctagactgctctgccaatttacgtacttcatctgcaacaattgcaaaacctcttccatgttcaccagctcttgccgcttcaattgccgcatttaaagctagaagatttgtttgatctgcaatgttttgaattacttccaatatatcaccaatttgttttgatttattatttaataactgtataacagcatctgattgtgaaaccgattctgcaatagactgcatctggtttactgttcttcctactagtttcccaccatcttctgctttttcacgagtatgagcagaagcgatattaatagatgatgaactatttgctacatgctgaattccttccgttacatcaaacagtaacatagcaccattttctacacttgttgtttgcgtcgttgccccacttgatatttcatccattgctgttgtaatttgctcagttgcttcactcgcttgtcttacacttgcagttagttcttctgatgctgctgcaacatgtcctgccgaagtgttaatccttccaattaacgtccgtaatgaatttgtcatctcgttaaaacctttcgcaagttgaccaatttcatcattagaatgaatttcaattgtttgcgttaaatccccttcacttatttctttagaagtgataactagtctctttaaaggcttcgtaattgaaagtgtcacaaaataaataagtactccacctactactaacgaaataagcataacaattaacatattataaaatacaggttgagcagcttcaattacttcagttgcgtacatcgtcccaccaattttccaacctgtttttacgtttgtagcaaataccatattcttttcactaccaccataagaatatgtaaaagcaccatgattatcttcataaattttctttgcccaagaatcagctgctttatcccctgatttttcttgtggatgagcaatgattttttgctttccatctaaaatgaaggcatatccttttttaccaatattgattaactttgttgtttttaataaattgtctaaacttaaatctagcgcaacaaccccatttttatcttctgtttgttttgcaatcgttacgacaatatgtccatttccttttgccttatatggctcgctaacaacaataccaccttgttttgccactgcatctttataccaaggtcgtgttgttggatcataatctgctgccatttgtatatttggttcctgtacaaatttcttatcattaccggcaacatacacttgttcaacatctatatttaaattgatatactgagataatgtctttcttagctcatcctgattatccccttgatacatattcccttgaattactcgtgcaaagttattcacatcgttaaattttgcttcaatcatttgattgattaaattatctaatatttttatattatcgttagcactactcgtaatttgtgattcaaaattctttttagcagtttgataagacatgcccccgattatagaaacggctgcaattaaaattacaaagaatgaaattaatagcttttttgctactttcatatcacgaaacaaatttaatagtttacccattatgaacctcctaattttcaaatttaaaagttaaattgagttaattataaatatttcccattccttaattattattttcataacctattatggtgaatactttgtaaagtttaaacaattaatttccctttgtctatatatatgaataatattattataaaatttacaaatagaaaaaaccaaaggggcccctttggtttttacatttttttatgttgtttagaaattttcttccatttatcacgctctgctctggcaaggattgcatcttgtttcctcataaaatacgccagttctctttgtaattttttatagcttttcaaacgatctatcgtaataagtccgttttcaattgcactatacaccgcgcatcctggttcattctcatgcttacaatcacggaaacgacatgttgtcgcaagttcttcaatatcagagaatgctgtttgaatcgcttcgctgccttcccaaagttgcaattccctcatgccaggcgtatcaatcacgagagcgccactaggcaattggaataattctcgatgcgttgtcgtatgcctccccctactatcctcttcacgtatatctcccgtttttgctacatcaattcctattagagcatttaacaaagttgactttcctacccctgatgatccaactaaagcaattgttttccctgaagaaacgaattgtttcaacgaatctatacctgtatgctctaaactatcaacaacgaaaataggaacaccaattgctatagcttccgtttctacaattttctcttccacatcattacatatactactctttgttaaaacaataactggcatagcgccgctttcatacgctaataataaataacgttccatccttctaacattaaaatcatgattaagtgcattcactaaaaataaataatctacatttgctgctataatctgttcttctgttcttgttccagcctcttgtcttgagaaagagcttcttcgctggaaaatacgatgaataatcgctttcttttcatcttctattttctttatatacacccaatcaccaactgctggataatcgcctttcgtaatcgcttcatgccgaaacttcccagacagttctgccatatattcaccatcattacaaataatgcgatatatatgcttatgctcaagtaaaatacgacctacttcataatttttctctgtaacttgttcttcaaaaaatgaatcccagccgaaagattctaaaatattttgattcaaataaatatcctccctagtttgtactaagtggaaggattgcgaattaccttatataatatcgccctttccatccacctttgtatttggttgattattcatataagttattttcgccataatacatcaccccgttcttattttaattattctcattatatggaattctcctataaaaagctacattattttacgtaattttcaaataacttgtttttgagcattctaatttgtcctcgatgactaatttcatcttctagcacatgaaaccatagatagtgctggttatatgctacaccgttaggccactttctttctgacatgagccactcatcaccttgttcacttaaatacttcagagattcttctcgaacactttgtagaagttgtacataatactttatttcatgaccacggattgctctacccgcttcccctaaatacagtgcatcttcccatatttctaattcttcttttgtaaagtcacgatcttgaaatgaaataagctgatgaactttttcaatagctgctatatgctttaataaggcgccaattgaatttccgctgctttgcataattaaatctaattgctcaactgataaattttttacttcgcctaatgttacagctctcgtatgctcaagcaggcttactaattcccctatttttttgtataaccatctacacttcttattcgataatctatattcatatcacgcacccctttctgcattcatattattgtaaaaatgattcatataatagactgaaatctatctaaattttctgttataattaatttgaatacaaaatatacccaaacaaactttctcaatatgcttatatgaaatattaaaaggaatcaatatgaaataatcgaatcttattcactaaaaggagtggattcgatggaaatgtatcaatggctaaccgctgttctcgttggtggcattaccggcttcgtttcccatctaatcaataaccaaggtaagttattgcttccacgccgtttgaaaacattttttcattttggatttttaactgatatttttactggtagcctagccgcacttcttgggctcgttttattcgatgtcaccgcaataaaagaaattataaaagtatccattgtaactgctatttccggtcaaacttttttactacatcaagctcttggtggcgaacaggctaaaaatacgcaaattgggaaagctgatgagaagattcaagaaattgacaaattattgcgacgttagtgtatactttcttttaaaattattgttataatgagaaataaatattttctattgcgtcgtttgtcaggagaaagggtgtttcgtatgacaaaaaagaaaatagaagatttcttaacaaactccgaaaaagaggaactgctagaaaactataaatgtttacgagaagcccgcacaaaaagcgaagctaactattttggcgaagcagtaaaccatctattaaataaagcaaaacaacgaattattaaagatgcaggtatacatgatgaaaatgctgcaactgttcaatcaaagagaaaagcactgttttagctacattagctaaaacagtgctttttatttagaatttttttctttccatgctatattctctctgcctttatctttccatttttacagtttcaaaagtcatctagacctaaagatcaacctaataatattagcccacgcaaaccattttaataatagataaaataattgaactagtaatgctacaaactaaataagtttattaaatcgcttcttttaaatctgaatgcggatttggtccgtattgattgtcattttcttcactttcaatgataaaaaatacaagtaaaacaatgctaccaaacggtacaaaatttaatagttgccaccatcccgttttcccaatatcatgtaatcgtcgtgcaccaaccgaaaaacttggtataatcattactaacataaatagcaacgcaataatagcaactaacacctctgaaaatgatgataaaaataacagtagccaaaaaattacgatattggataaactaaaaatccagtactcttttcgcgtagctctaccactaaaattcccataattctttagagctttcaaataccattgcatttaaacctctcccttttatccccaataaaattaaaatatgtaattattaacagataagtagaaatataacacaacatttatgtaaaatccatatccccatctaaattgccctctatttaaatagttttttccttcggcatttttcacattactttcacatctatttcacaaatataagtagtccgatatgctaaactaagtatatccttttccaaggaactatatgccgatatataaatccctatctttatagggatttttattttttgattcctcataactttgttacaatacatttcttctactatctctatacttttagtaaccactttaattaaaagcacattcatgtattcacactcttattaattctgatttgcgaaatatttatacaagctttatgatgcaattcctgtttcactattttcagtaattttttcactttttctaaacaaaaataaagctcctatatatagtaacgcagtaaaactacctataagtataaaattgtgagatattgcaaataacattccagctattgccgcaccaatcatttgaccaatgtacatagaagcatttgcaagcgccgctcctgttcctcttgctacactagacatgttttgtaagtgcctcatcattaatacaaacaaaattcctgtcacaaaaaataaagcaaagaacaataactccaccaatacaatgttctttacatgaggaagtaatacatatagcactgctgtaaatataattccaccatagaaagaaaggttataaccaattttatttacgattctaggaccaaaaatattaccaattaaatttcctaatcctaatacgagcatagctgtacctacttcatgaacttgtaagccaaattgaatggaaagccatacaccaaaaaatgaaaatgcagcaaaatttccggtttgaaaaacaaagtatgcaaaataagaaagtgaaacctttgaatctgtaagtaattgtttataacgctgtaaaatcgcttttttatttccacctatatgaaccgactgtatttctggtaatacaacataaataagaatgacaagtagtgctgataatataccaatgaaatagaatggaattgtataatgtatcgttgctaaataagctcccagtggcagccctaaaatttgagagattgataaccctgctgttgcaacaccaattgctttcacaatttgcttcttctctataagaagcggaatagatgcccacacttgtggagatacaaaagctgcacttacacctgctaaaaatctaaatgttagcatccataaaaaactcggtgcaattccacaaaaaaacgtacttattgcaaaaaaactcatacctagtaccattactttttttctgtttaatccatctgatataggaccagccacaagcgcaaatccagcataccctaaagcatacgaactcaccatccatcctgacaactcagttgaaacatgatacacctgttgcaatgtcggcaacagtggtgaaattaagaaagtatctgtaccgatcataaacattatcataaaaaatacagctagtactctgttcatttagaccttctccttatataaacagagggtactctccctctgtttaactaatcttctaaaatagattggatttctttcatgactctttcattcaatgcaacatctaccgctttcacactttctcttacctgctctgcccgctttccaccaggtataacagtatcaatcccttctttatttaataaccatgctaacgctaaatgagacacttcaatatcattttctttagctagcccttttaacttattcactttcttaaaattactcttatatgtattttcttcaaatagatttacattttgacgccaatcgacttcatttaatttaaaatcttctgtatattttccgcctaatattccaaaagcaagaggcccatatggaataaatgaaatacccgcttctatacaatacggcaacagttcttcctcagctgtacgttctaacatattgtatggagattgtacaacatctatatgaccatgttgattcgcctcttttaattgttctatgtttacgttcgatattccaattgaacgaattttcccttcttcttttaaatgagtaagctctccgattgaatctatgtaacttgtttcaggatttgtaaagtgtaaataatataaatcaatatattcagtctgtaatcttcttaagctattttccacagcattccttaaataacttggttcattgttaatataagtttctccatttaacaacggttgaattccaccttttgtagcaagtataaactcatgacgttttccctttaatacttctcctactaattcctccgatctaccgaaaccatatgaatctgctgtatcaaaaaatgtaatcccttgctgaatagcttcttctactaatcgctttccttcttcttcattcacatcagcatataaattatgtccccctactgcatttgtacctaaacccaactttgaaatatttaatcctgccttttgcaattttatatacttcattttttctccccctatatttctattgttcgaatatattcgaacaatagaaatataccactttatatgttatagtgcaaatatcttaacttatacaagtaggtgaaatatgcgtacactctatcatccaaatcgagaagaaattcaattttcttctgtcttatatgcacttagcgatcaaattcgtttacaaattgtaaatatgttactagagaaaaatgaacaatcttgtggtgctttaaacatccctgttgcaaaatcaactttatctcaccatttcaaagttttacgtgagtcaggtgttatgtacacgcgccttgaaggaacacaacgtttcatttcaattcgtgaagaagatttaaatgctagattcccaggtttattacaagttgtattacatgcgacagagccatattaaaaaaacatctcatattcatatgagatgtttttttaatatggctattcttttaataaatctattaatccattcccttcagatgtacgttcgtaccctaaaggtacagttcttttaatgagttgtgcatatatttccggctccgataactttcgaccgtattctttctcacactgtttaatgagcaaggcgagcgctccagcaacatgcggcgtcgccatggaagttccacttagcacagcatattttccttctggatacgtagataatatttcatcacctggcgctactagatcaatttcttgatttgaattactaaaacatgcaatcttccgctctaaattaacggcaccaacttcaattacctcggagtacgcacccggaaagtctagttcctctgtttcatcatcgcaatctccattatttccagcagcacatacaacgagaacatcctgctttaccgcattttgaattgcttcatgtaattctggaacatcttgcggaccaccaagtgacattgaaataattctcactttctcttgattcggccctctccaatttacagcataatgaattgcctcaataatttgctcataacttccagaaccatctcccgctaaaacttttaatactaacattttagcaagtggtgcaactcctaatacaccgacaccattttcagtcgcggcaatcgttcccgcaacatgagtaccatgtccgttattatcaagatacacatttggatcagcttcataatcttttgtgaaatttcttccgccgataatacgatcttttaaatctatatgattagtatcacaccctgtatctaatacggcaacgactacatcttgccccttcacactcttttcccatacttgcggagcgtgaatcagttgtacacctggtggaatttcatttacttgttctaccaccttatttacggtaaacggaatcaattgtatacctttttgtttattcactgtactactcatcgtaatccctcctgaaaatgtattattttcatttcagaccacttttgaatacgtgtaaatgtaacattcgttttattctttttgttttccttcttttcaaatatttctcaacatcatttactacctctataatacttctttattttccctatgatttgtaggaagtaacaacccgagtcgttcaactaataaccaaaataagaggaccaattaatggtcctcttacagtcttttaaaagaatgatatgtatttgaaaaataatataaattaagactaaacctcactcttgtttaaaaacttttctatttcttttactaaatattccgctccctctatgccaactgtaatatttccatttgctaatgtaatattctgccctgaaacatcacctgtgatttggcaagcattgtaaggttgatatttttgtaaaatgattttatctgcttctacaaaaatttcaagcggtgatttgatttgtattcccaatacatcgcgtaattctttagggataacaattcgtcctaattcgtctacttttcgaataactcctgttgctttcatatttctccccccttactctctattaattttttcacctcgctttttccattttatcactttttgacaatacttgcctctttttagaaaattttgtactcgagttaaaaaaacacatttaatgcatacgtaatctctctttcaattgttttacataacgggatcttataagtaagaagtatacaacttgaataactatgaaaatacttaatacaactgtattttctttaaacaatgagtactcaaacatttgccctaacgccgttaaggctactgctccatgtaatgttgcaacaccaattggaacgaagaataaaagcgccaatcgaattgtaactaccttcgataattccctacttgtcaatccaactttacgaatcatttcgaacaaacgaacatcatcctccaaatcggagaataaacggaagtaaaggaaacttcctgcgcaaacgaaaaatactataccaataaagaaacctacaaataaaatcggtcctgcaatttgtaaactttggttttgctcgtactcttccgcactaaacgttgaatattcttgatacggtttaatttgatgcgtaagctctttaccaatttcaatctcatctttcgttctttcagttttatacatataatcttttgtctctataaacccatcttgtaatgaatcatattgattattagagattacataaacatttcctcttaatattttccccaatgaagatgaagtaacttttttcacttttaaattttcattcatattaggtaaagtaatttcttttctttctttcatcgttggccctggtatattagctgacaaaaatacaacttctttatttgctacagtattaaatggttctcctgttaactttgcatatttcttatagtctgattcttttataaaaatggcgcttcttaacgactgttcctccgttttctttgtcgaaatattagtttttgaagctgctatactatgtttctttaatcctttgtcaatcatttgtatatgctgtgattcgttactattcccttgcttagaatggtaatgaaacgaaatcggtctctccattatccctttcgtcatggatgcgaagccaactaatgtccctattgcggaaaatgctacagtagaaataatggttacaataaagaacattcttgcgttatctctcatgcgatacgctaaatctgataacgtaataatattagtctgtgtccaataaaaacgtttactttttttacataatcgaataataaagacactcagctgcttgtacaacaaatacgtcccaataataactaccgttgtaacaggaatcatcataataaataccattgctccatgtgatagaagagctcctacatagccagcactaagcaatactactgctaatatggaagaaatgattgatgctttcggttcaggtttcgcctctgccgatcctctaaacaacttcataatcttatttttacgaatcattcctgcactaaacaatgatatgatcataaataaaataaaaaacataatactcgttacaacaattgctttcatcggtatgtaataggataaggagatatctagtttcaatatcatcggagcgacaaatagtaatacccctgaaaataacatacctgaaagaataccaaaaataattgcccctattccaatcataatattttcaaaaaagattagacgctttaattgatatttcgtcatacctaacatcattaaaatccctagttcacgctttctcgtttttaaaaacattcccatcgaatataaaataaagaagaatgtaaataagtaaataatagactgtgcaaaagacatacttacgaatacgtactgacctaattctcctgcacttaatgccggatgaaacgcaaaaaatgaatacacaaaaaaggccataattgcaaatgcactactcaaaaaataggctgagtatgtccgtctatttcgggttacattccgatatgctagttctctaatgttcatattacttctccgcccttctactatctatgtttttatattagtaaagtgcggaaataccttccatcgattcaaatgacaaaaaccttacatttttgaaaggtttaaaaaaattgcttatacgtagtactttatttataatgactacattcatattcatattcatacacacatcctattgtatattcgttaattttgcgaaataataaaggatagaagtatgtaccattatacatataaacttaattaccgctttaatatgaataggaggaaacataatgacattacaagaacagattatgaaagcattacatgttcagcctgtaattgatccaaaagttgaaattcgtaaacgagttgatttcttaaaggattatgtaaaaaaaacaggtgcaaaaggatttgtacttggtattagcggcggacaagactctacattagcaggacgcttagcacaacttgcagttgaagaaattcgtaacgaaggtggtaatgcaacgtttatcgccgtgcgtcttccttataaagtacaaaaagatgaagatgatgcacaattagcattacaattcattcaagcagatcaatctgttgcatttgatattgcttcaactgttgatgctttttcaaatcaatatgaaaacttattgggtgaatcattaacagatttcaataaaggtaacgtgaaagcacgtatccgtatggttactcaatatgcaattggtggacaaaaagggctacttgttatcggaacagatcacgctgcagaagctgtaacagggttctttacaaaattcggagatggtggtgcagatttattaccattaacgggattaacgaagcgccaaggacgtgcattattacaagagttaggtgcagacgagcgactttacttaaaaatgccaacagctgatttattagatgaaaaaccaggtcaagctgatgaaacagagttaggtattacttatgatcaattagatgattatttagaaggtaaagcagttccagctgacgttgcagagaaaattgaaaaacgttacacagtgagtgagcataaaagacaagtaccagcgtcaatgtttgatgattggtggaaataaattaaacataaaaaagaagctaatcttcatttagcttcttttttatatgttaacgatatacccctactcttttctccaataaatcttgcaggcaatcttcatgttgtttacaaaataacggtggcatgtcgtctaacgggaaaaacttcaaatccagcgtttcatcaccatctacttttttgtcacctccaactattgagaatgaaaagaacatcacaattgactgagccttgtctccatttggatatgattgaaaatattttgtatacactccaataagctcatttatttctacatcatacccggtttcttctttgatttctcggattgcagtttccgcagctgattctcctatctccattgcaccacctggaaatccccaagcgttaaagtctcctcttttttgcagtaatacttctccttctttattaaatacacaaccaccggcaaagtttaagaaaacataatcatgtcctactttttcacgtaattcttttatataattggccattctctttccccttttcatacctcttctatcgctatttcttatctttttcaagcaattcaatgattcgatctagcttctggttcatattaatcacgtggtgtttctttgcagcactgctttgtaatactcttctaataaacaaagtaaatgatatgaaaaacaaaacgataagtccgattactaaacaagtatatatcaatgtaaaaatattactttcgaacaagttcattccacattcacatccttatccatttattctatcacacaattcttaatattcaaaagcaatcaattaataaaaaaagcaccttttacagatgctttttcccattgcttaatacgtaaatgtaattgtcgctaatgaataacccgccaatgcactgtaaggcgctacttgataagacacacgctttgcaccttttggccaatttatttcatttaatactttctttatatcttgcatcgttccatccatggactgcttatatcgcacttctactttttctggcttggctgcaaactgttgctgcaactttttcttaaattcattataattttctgctccgtattctgcagataagtattgtaaatttgtttcttttaacatctgctcatatacgacagtttttgagctaccagcttttattttatttgttaattcaccaaaataacttgtagttgccgctggatatttgctacgatcccattcatgatctttacttaactgttcgtcagacatattaaaatatgagtaagttacacgccctgctttatctggtactggatcatcaaatgtagtatctaggtgataccatttgttttcaatgttcactaaattccacgcgtgagcttgtccatttcctgtgcctgttacaatatgattttgaatacctgcctcttttaacaactcatacgttaataatgtatatccttggcaaacggcagaacgattcgctaatgcttcatatgctgtatacgcttgataagacgtatcataagacacatgcttaacaacgtaatcgtgaatagcttttactttctcatgctcatccatccctagttttacaattgatccaacaattgatttcgcctgagcttttacatattgagtttgttcttttgattcacggtattttacttgcagtgtaaacgtatagtcccctggcattcctttaatagaatatctagtagacgctacattatattttacatactcatcagcatctacaattttattaaactcaccatacaattgatccataatatttctagcatttctatcttttgttttatatgtgattgtaatattctcttctcgattatcaatctgtttttttaattcttttctgaaatcatctaataactttacatctgattgtgctgtcactgtagtcggatttgtagctgcataagatacagatgacgcttgtaagcctcccattactatagttgaacaaagtgcggcagctgtcacatacttacttgtctttcccatcttgtcactccttatattctataactatacgaaaaagtatcgtatagtttcagagtatacaatactttttcgtataggtcatatgagattatgcatattaactaattcacataaaaaggttgttctttttaaaagaacaaccttttttcattagcatgtttgtaatacgcagcatgtattttcaaaacgttgatttttcaaatcttcattactaatacagaaatatagcatccctagttctccccaaaccatattacaatttttatgatctgaatcaatttggaataaaagagtcatttgctgcgggtctactcccatatattctcccgtctcatataacacttcttcttgtacagagaatggctcaccaaacatttgatggttatcgtagttatccggaattagctcttcaagtaattgcaagaaacgatctgaatcagcctcatcttcaatgaaaagttctggtaatttgtatgtcagttcaaaagtaattgcacactggttatatttcgcttgtacttcatttcctcttcgtaattgctctacaggaacatcataataaagtacacccccagcctctgttagcttcacattttcttcaaaataattttcaatgcaaaagaaatacagcatccccgtcttaggaagattgtgatccataccaacgttttgtaaatcacttaagttaaattgcgcgataaattgtagtggatttcctttatgctttggatattcaaataaagctggtaaatcaggaactcctcccattttcgaactacctatcgcaacagtttcctgctgctttggcacaacttttatacaaggaaatacagtattaataagttcctctttcaagtgtgttagttcatatttatcaattaatacttcaatttttttattcataaattctccttacatttacatacttatttatatcatagtacaaagattatacttcattctttacaaaatcaacaagcctccaaaaaacgggcttatccttcgtacgcgaacaagtttaaaaaagcatactatacattgttcctacaaacacgatagttctttagttcttccagtacattttcccctcgttcatttttatttttaatataaggaggaattccacatgggttacggatatagttgcggcggttacggcggtagctgtggtggttgtggttacggaggtttcgctttattaatcgttttattcatccttctaatcatcatcggagctagctgttggggcggctttgtaggctgctagtaaacttaaaaaccattgtaaaaaagcacgtacaatacgtgcttttttgccatttccaaatcttttatttgaaaggaagtatgtttaatgaagattgatggtgtttttgaaggaggcggtgtgcgcggtattgcgcatgttggggcaatttgcgcgttagccgaaaaaggttatgaatgggaacgtgtagctggaacatcagctggtgcaattatcgcggcacttttagctgcaggatattcttgttcagagctaaaaaccattataactgatatcgattataataaatttacgaagaaaacctttattgacaaaatcccctttatcggaaaaggactaagtgcatggactactctaggtatatactctaatgtatttatagaagaatggattgaagaattacttcgaaaaaaaggtgttcatttatttactgatttaccggatctaaacaaactcaaaatcatcgcttctgatattagtaatggtaaaatggttgtctttcctgacgacttaccaaactatggatttttaaattatcgcttctctatcgctaaagcggtaagaatgagtagtacaatccccttcttctttgaacccgtaaaatggagaactccaaaatggaagcagccttgttatatggttgacggaggaattctaagtaattatccaatttggatcttcgattcacctaccgctcctcgctggccgactttcggatttcattttgtaaaagatgagattcaagctgaccctgctcactataacgagcctatttctatgttcaaaggactatttaaaacaatgatgcaagctcatgatttacgtcatttagataaggaatcaaaagcaagaacaattacaattccaacaggaacgattacaagtactaattttgaactgacgaaggaagaaaaagactggctttacaattctggttataactctgctaataaatttttacaagcttggaactttaggcaatatattgatgagtatagaaaaggaaatcaagaccgaaagacaaatcgattttttcgtcaacttgactcataatattattactttgcgtataaatacgagaacgtttaacaacttaatagtaaataagcctagtaaattcttatattactagacttatttacttcctatataatctcatacattgtttaaggatacgttaagccttcggcttcttctgcagttataactatgtaacgatttcccgttcttaatcctaacagttctgctttttcaatcgcctcttgcttcgtctccgcataagcagctaaatattttcctccattgatcatttggcaaattacatattgtttcattactttctcctcttactttttcattagttgtgcaagtttttttatacctatttcaatttcttctaacgttgcgtatgaatacgataggcgcaaaaattgatttgcacttctatcatataaagtacctgggtttaataaaaccttttcttgcagagctttatcaaataaactgcgatatgaaatgggtacttttatatgtacccatatataaaacccgcctgttggttcatgccaagttgctatttcacgaagatatttatctaacattagtaacataaaatctcttcgttttttcaattcacttcttacaaatcgcaaatgctcatcatatagaccatttgtaaaccactctgctgcaatttgctgggatatagtgcttgaaccataatctgtttgcatctttatgtctgacaatctttgaattactggctcgggtccaacaatccatccaattcttaaacctggactaattactttggacatgcttccaatatgtagtacgattccatttttatcataggcctttaaaggtttcgaactaggtgcatcaaaccataagtcttgatacactgcgtcctctataataggtaatccaatttcattacatatttccatcacttctattcgtttcttcgcattcatactaaagttcgttggattatgaaaagacgggattgtatataaaatagaggcattaaattgcttcttatatttcttaatatatgatgtatgtaacccgctttcatccattgggattccaattaaacgtactcctgctgattgaaaaacattaagcgaatataaataggatggtttctctaataagattgatgcccctttcgaaagaagccccatagaaataagttgcagcgcttgaattgctcctgaaacaattaatatagagtcaggagatacatatacgccatgctcctttaagtattcggaaatcttttcccttaaataaagatttcctttcggctcttcatacccaagcgtcacatttgactttaaaaggttattcataatttctttcatctttttctcaggtaagagactcggcgcgagctcacctgttcctaaccgaattacatgtgggtaaaattcagcttgattaatctcttgaatagctgggagattcggataatgaagtcctgtttctacataagactgccaattaggcgggggtgcgtaagttgaaacattctcattattatttacaacaattgttcctttcctgccattcccttcaatatatcccttcgcaactagttcatcgaaagccattacaattgtgcttcgattcacaccaaatgtatgggccaaatctctttgtgaaggtaatttcgttccaacggtccattctccattaacgatcctttcttttatatacgtttctatttgtttatacagcggcgtcgctagagacatatccggtttccaaacgaatctttccatcatatcaccttatattctttttggttggtaacctccccaaccatatggatggatacaaattttcatttcttctatacaatatacactatcataatgaattaaaataggaggtaatatgatgagtgaagcaattattcatggtatcattcttgcatttggacttatcattccattaggtgtacaaaatgtttttgtctttaaccaaggtgcgagccaaccaaacatttggagggcagcccctgtagtattaactgcctctatatgtgatacgttactcatattgattgcagtgcaaggtgtctcccttgtactccttactttttcttggctaactaactcattatatataattggatttttctttctcctatacatgggctttgttatttggagaagtagcccttccaacgatgtaacacaagaaaaaagtatgcccttaaaaaagcaaatccttttcgcagcatcagtttcgttattaaatccacatgctattttagacacaatcggtgtaattggaacaaattctattcaatacataggaagtgaaaaatgggctttcacacttgcaactattatcgtttcttggatttggtttataagcttagctttagcggggaaatttctaaaaagactagactcaaccggaaagacaattttattattaaataaattttctggtctcatcatatggggtgtcgcactttatatgttaaaacaagttatttattcttaatgaacgaaagagaattgcatgttactcaaaacatcatgcaattctcttacaaattatgaagtaggttccggtttctgttttaccgcctttgcatcctttgctggtttaatccaaatgattgctatgacagcaccaatggcagcgaaaatactagtcaaataaaacacttcatggtccgcccctttcatgaaaaaagaatataaaggtggtccagctgctacaccgataaatcgcattgaactgtaaaatgacgtaactgttcccctttgctccttttcaattccttgtgtaatgagggcatctaaacatgggagtgccataccaatccctatccccataataacgagacaaagaagtagtaaataaatcccttttataaataaaggaatgatgactgatgcagctgccattaaaaacccaatatagatacacttcttcataacattttgattatctccaatttttttaccggccatatatgaactaagtgacagtacaagtaacgggatagcaagcacacaccctttccatataccatgaatgtcatactttgattccagtatagtcgacaaataaaagagaattccgaataaaataagcataataattgcacctaatgcaaaaatggcaattaaccatcttcctttttctcgaaacgtagacagaatagattttataaactctttaagtggtggtacttctccttcttgtttctttgcctttactagaacaagtaataaaacaattgatactacgcataaaattggaatcgcccaaaatggtaagaaccatacaacggcagcaagagcagaccctaaaatagggctcagcactttcccaaatgtattggatgtttctatgattcctaaacctgtactaacttgtttttcgtctttgtataaatcaccaacacacggtataacaactggcattgcaccagcagcaccaataccttgaatcgctctaccaatcaatatccaattgtagggattatcaactttccaagatacccaaccagttatcgctcctcctatagctgcaatcagcaaactcggaaccattaccatctttcgtccccatctatctgataaataaccagcaatcggtataagtagaatggctacgatagagtaaattgtaataatcatggatacttgaaacgatgaaatatgtaatttcttttcaatagtcggcagaattgggatgagcattgaattccctaatgtcataacaagtggaactgatgcaagcgcaattaaacaacagttttctttttttaacatgttggcttcgaaacctttcatcatatatttcttaccatataatagccccgctggaacgtaacttttcattccaccagggctattacatctttactacttcccattcacaacaaaagaaattggggaaattatagtattattcctattctttgaatccagttcacaatatatccataccaattaattgaaaaaaaagaaaggaagaatccttcctttctcctataaccttctacaattagcgagtatatccgccaccaagttgttgttctgccatcgctacaaggcgttttgtaatttcaccgcctacagaaccgtttgcacgtgaagaagtatcagcgccaagttgtacaccaaactcttgtgcaatttcatatttcatttgatctaaagctgcttgtgctccatgtgatgctaattgattagaattacgatttctagccattaccaatcacctccttatttatatataaattgtgttaaattcaaattaaaatacatggaaatttttggttattttttaccataaaaaaagagcctctaaaacgagactctcacatcatttcacattacgaagttactacttctaattttctatttattaatactttcatttcttcttttaatatctcttttgcattatgtccaaaccattctaaggaagcaaaaagatccgtacctctcacttcctgaataatctcatcataatttacaataccttcaaataacggaaccataccaatacgacttcctgctgcagcatatacattattaggttcaaacacatgcaaataatccgctgaagatatattcttaaaatggtaatgtagtgtccacggctttaatcgatggaaactgtctattggatctgcgccagactcccatatatggagaaaatcaagatttatttttaaattcggatgatttacttcttctaatagttctatagtagaaggcaatgtgtctgttagtgtattgggatgtgtttctaacagcacatacatattgtgctgagcaaacacatcacaaatcttacgtattcgctttacatactcttttctctcttgttccgagaagtccttgctccctttttgcccagcaaacgtgcgaattttattcgtattaaaccaattagctagtactacaagttgttcacttttctctatcgttttttcaaaatctgctgataatgatatatctaagtaatcacttatcatcgtaatttctaagtttttatcctttagaaaagtcaattctcgttctgtcgtttcgcgttcttgtatatacaaattttgtgcatgagtcccccacaattcaattccttcaaaaccgttttcatatgcaaattgaacaatatcagtaaatgaaattaattgatgacgaaatgaaatggtacatagcgaatatttcatagcattaaactcccctatcttaaattcagttagcttattaaaaagttgcgacagactgatttgttttcatacctttccatgatagaaactgtctctctaattccttcttaatttgcagttcaattgcattcatttcatccagtttttcaataatcgatactagcatacctttattattcgtcattgccattttaattgcacgatactgtacatttgtaaatccttgtacaatatcctctacccgatcacaccaataatcaaattcttgctccgaatattgcaacgtttcacggaagtatgcaaaggcatgctcataactatatttacgaattgcaagtactggtatttgttttactgctgctacaagaccagaaagcgcatatccttcttcctcatttgccatttttacaattaaatttttcagttccatagtcagttcattgtcgttctttttgaatgtttctgtgaaataactagctactgtttcttgcgttggctccccaattccttctatatcaatgaaataacctccaccaaatgggttatcttgaatagagtgaagtactttttctctttccatatttccttcccaacgaaaatcaggatctagcatgaaccactcttcttctttctctgtttttgatatcattaaataatgtggaaacggtttttgatgaaatttattttccctctctggtaatagagacatatcaaccattacaatgacataacgattttccggcttgttttctactaattctaaaaacgtttctacattgctatctttatcttttgcatgatcataccattcgtttactttaataccgtacaatttttcaaaccaaagtaaataatgatcatggttaatgttttcagagtgatatgaaataattccgccttctgttatatcaaaatctccatcccatagtccaaaataaaatggacgaaaatcaatgtcgctacgcctttttataatttcacaaaaacaactcactaaacagtgcacttttattgaagtcatactctcatccactttcctaaaggttagttattcacatttacttcttgtaactcctccataaaatcaagcaaagatcctacagtaagaaatgcctttggatctacctcatcctctggaacgcatagctttatatccatttctatgtatacaataagctgtaacatcattaccgaatctatatataaatcttgatttaagcgcatcgtttcttctaaatgcgttacatttttcagttccattttttctatcataatttttaacacggcattctttaacgcttcccgtctcatgttgtaacctctcccatctctagtaactttctacttacttttccagttttatttttaggaatttcatttacactttcaatttcatggggaactttataagaaggtaagtgctgaatacaccattctcttatttgtactggatcaacatgagagatcactttcgctttaactatttcgcccatgacaggatgtttccctcgatatacaattgcctcttgaacaccttccaatcgaagcatcgtttcttctacctctataggaaagacttttaatcccgaaacattaattacatcgtccatacgccccataaaatgaatgccacgctcagatttataccctaaatctttcgtgaagatttccttatcattcattttcacgacgatttcttccggtgcattttcatctgaacctatgcttatactcgcatgaggtagagggtttcctaaatctaaatggctcttcatatcatgacatatactaatacaacctgcttcagaacaaccgtattgctgcatcatatatgttgtcatttcttttagtttataaaatagtgcttctggcaagggcgatcctgatgtcataattttatgaaactggaacgttcctaatggaaaactccccataatgtgtaacataagtggtactgcatatataatatgtttctctgtattgcgaactatatttaatgcgaatttaggatttttattcgtaatgattacaggctggctccccctcttaattgctgataaagtaccacatattagtccgtatgaatgtgaaacaggagccataacgattggcacttcatctacttcacagtttaaagcttcattataagcggtaatttccgtatcaacttccgtccatgctctacgaattagtttcggttcccctgtagttccagaactatattgcaataaagaaggctcttctagtaaaaagttccctacttctaattttgtaaaatcgccatattctccatataaaattcctacacaatttgcacgctttgccattttaatagctgtttcttttggtgtatcttcatgtataagtaatactgatgatttcttttcttttaagaaaaacacaatcgtaataatatcgaatggatctttcagacaaagtgcaaatctatttccttctgcttctttaaattgttccatttcctcataaacttgtaatctcgattcaaaatcacttttgctatactcttgtttattaacgattagcataatttccccctgtaacagctgatttttgtttcataagttgtcttactctatacaatggatttggaacttcatgaacaagcgattccagatccatatataatcgacgtttcgttaattgttcagcatagaatgtaggtgcatataattgaatattttcaaatctacctttcaaatgtggatatattcttaaatgattttcaatttcttcaacaaccatcatccaaaaatgttcttctttcaatccatattcatccgcaagtacgaatgctaattctcctaaattaaacaggaatagtgcatctaacaccatctcttgcaaacattcaatgcgatccatttcaaagaaatcattcatttttccattcgcatatgttttatgcattttagtaaagtcgggacatttgtcaaccgttttcaaatatggacgataaaactcaagcccttcatgaaaatcctttaacgcaatacgaacaggcaccccttctttatggactagaatcatattttgtccatgtgattccagtgcgatgccatgctctacaacaagatgtataactggtattatcgctttttgaataagtaattgtagccaatccttcattccatatttattcaaccacgcatcaataattggtgtaccatttttctctttagcgtataaaccattaaaaggaattgcatcttcttgtgcatctaaatacttatgaatgctttcgcgccaaatacatcctaatgaaccatatatagcttttttattcgtgtcatacgttacactggaaaactcatttaacaagattaaacgtgcttcatccattaaataggcgtcattacttacaacatcatttaaccaatttgatattgctggtgcactcacaacagagtatggtttcagcgtacgaagtgttgaagtgttgagtaaattcatcgataatttaacgtacggtttctttggactcgtaatatttcttaatgttctcattgactgttgcgcgcaataatcgtcctcagatgttcctaaataaataataaatttcccctgtatatgatccgcataatttgaaatgatgaaattcacccactgccatgggtgaacaggtataaacacgtactgttttggattacatcccttattacgaattcgttccataaactcttctaatttacgatcgccaatctcctcttttaaaaggttgttatacatcacttcattctcataacctataaatgctaacttaaatatgtacattaacgcttgaataaatatgtacattttcagaagactacattgataatcttaaaaatttctggaatgtttcagaaacaaagttagttcaatttatattagaaaatgatcaaaattattatgcatgggtaccaaaagaagcaagtatcccaaatatgtatgaagtaaagatagagagtgtcgatgtagaggaagttctataacgaacaaatcgaaatgttttttattatatgtaatattagaatgcattttactagttaattgaaaacaatgcatgcgtggcagaaaaaaggatgtatcgttactaaaaattagagggaaagaagggtgttggattgagttaagcacctcattgtcaatatacgacaataggtgcttttttgcgtgcaatgaagaaaaaataaaagattcattttcactctatttcatctttgaaatacatgttataatttggaaaaaatatattcttaatttttagataattgaaaggtggtagattactatatgagtacattaaagaaaattactaacaatatttcgaaagttattataggaaaaaacgaatcgatagaactagcagccattgctctaatagcaagggggcatattttattagaagatgtacctggaacaggaaaaacaacgttagcgaaaagcttggctaaaagtgtggacgctaaatttcaaagaatacaatttacagcggatactttgccgggagatgttattggtcttgaatattttgatgtgaaggaatccgaatttaaaacgaggttgggtcctatttttgcaaatatagtagtagtagacgaaataaatcgtgctgtaccgagaacgcaatcttcgttactggaagtgatggaagaacgtactgttacgattgcgaaacagacacattcattaccagaaccctttttagtaattgcaacgcaaaatcctcttgaatccgccggtacatttcctttacctgatgctcagttagatcgatttttacttactatacgccaaggctatcctacaagagaagcagaaaaggagatgatgaatcgtttccaaacaaatgatccgttagaaacgttacattccattatttcaactgaagaaattattacagtgcaaaagcgtgcaagagaagtgttagtagggaatgatgtgcaagattatctccttgaaattattgaagcaactcgtaaccatgagttaattgaaattggtgtaagccctcggggaacgttggcatttatgagagcaattcaagcacgggcaatattaaatgaaagagattactgtacgccagatgatattaagacgctcgctgcatccgtttgtgctcatcgtttaacgttaacgattgagggagagatgaaaacgacgaaagaacaaattatgaaagaaattcttcatacgattagtgtgctagtggagaatgtacgatgaatcaacagcttgtgtatacacctttagcggagcctttcgtaatgggggttatgtcagttgtagccgttattttaagtgtattttcaagcaatctactgtttttatctctcgtatttttatatgtaattttaataggtgctatgcatgtatatatacgtaaagtatctcgtgttgaatgggaatacagtcaagggagttcgaatgtttttataggtgaaacgaatatgtgcaaaatgaaaatttcaaacaagtcgatatttcctattcttaatatcgtatttcgatttaaatgtgaaaataagctaacttggaatcatgatgaaataaacaaaaattatagtacaggttcaaattattatatgaattttaatttaaaaggaagggagtcagtttcatttgatttgcaagctgtagcgttaaaaagaggcatcgcgaaatgggaagaagttgaaattgtcattacggatccctttggattcataacgaaccatataacgtataaacaagttggaacgccgtcttatttagttttaccagctgttccgaaaatgcaagttcctgaattgcaagaatggtcacgagggtttcgaaaagcgatgtcatcccccttatatgatgaaacgaaagtaatgggagtgaagtcgtatgaaaatgaagattttcgttctatccactggagtgcaacagcgaaaacagggacgataaccgcgaaaaagtacgagcgaacacaatcagataaatatgcgatatatctcaacttgcaaaataaaagcggtatttctttgcgaaatgatacagaggaactcattgaattaacggcaggcatatgtaaacaactgcttatgcaaaactgttcatttgaagtatggatcaatagcgtaaaagataacggtttgctacatataaagaacggtcataaccgaaaacatttgcaaaatgtattaaaagtacttgcctcaatatcggaccaagatactcctgtatcgtctacttatttttacacagcaggctttcggcgaaaagaattggatgcagttcctttaattcttggtacttccccaaagaaatacagtagaacgaataaatgggtcgtaattaaagaataagaaggggtttatgttatggctaataaagagcgacatatgaaggtgaaggtttggagtattagagttttcatgatacttttctttacggttagtgcgataacgttatcacaaggtgttgtgcatgtacaagacatagtaaaagggcttttttctagtaagacggagacaatatcggaaagaaattatgattttactagtttagatgaacagtttgatgaacctgaaagaattatagatgaagaaacaggagttgtagatacaagaacaaaaatagataggaaaattccactttttgtacgaaaaaattcatggactgatgtgttttctgttctttcaaatgcatggattagtgtcgttttttatgtaattattgcagtggtcattctctatgctttttataaattaacgaggagaaaggtaacgaaattagaaatagaacaggataaacaatcgataacaaaagaaaatatggatagaaccgaaaagaacaagaaagtgaagcatcagtttgaacagccgttacttaaagataagataaggcaaacgttagtggaatgggaaagaacattaccgtttcatgaacagagaaggtcatatgaaacgatgcaacaatggttaagcagaatttgtagaacgcaagatattattccgatatatgagtctgtccgatatggagaaaagacgtatacggagttagatgtagagaagactgtacgatggatagagcgagacgggaaggcgtgacattaatataagtaaatgaaattaactgtaaattaatttcatttacttatatttaattacatggtaatgtatacttacttttttatatctctaccaatgtaaaaaggtagccttagtaaagtattgctcgttgaattttttttgaggttatcttcacttcatcaatatagaatgaaaaagtgatgaatccattacgggtatcatgtaaataaaaaatataatttatatttaaatttttgtgagggtgtgaaaatagaatgaaaccggtattgaaaaacatactcctttcctttattttttctgcagcagggatgtgttggttcctatttatgttagttagaggagacggagattggttattgtcttgggtaggtgtattaatggcctttttatctttatacacgttaatagatttatattgtaagtatacatacgataaaaaattaagtgaattgtttatcaaagcaacaattactacctttagttttgcagtattgggaatcacatttggtattgtacacgagctattacagccatggagtcttagtttaatggtttggtattggttgttagtgttacttttatttgtaacgaccataatattattagtttttgtattatttgttaatcgtaaaaattataatattcctgggagatatagaatacttatactgtttaatctatttcttacgttagccccagtgctgtggccattactacttactcttatcgggaatggcatgaacgctagtgcaggatggtaaaagtgaatgaactaaaaagttgatatagggttttaagtatgtaagagaacgtgttttgataaattgaaaacacgttctttttttattttcatacattactttttctcatctgggcgtctaattttgaaagtaagtatttcgtaaggaatggataagaaaaaagagagatttattatataagatgaaagtgtagcttgaatcaatacgatatggatagaggagagaaccttatgaaaaaatgtacttcaataaagttaggaagttttgcagttttaatagcgggtactactcttttcgcaccaggttttaatgtgaaagcagagtctactcaaaatatttctagtccgtcacaagcacaggatcaaaagaatcggaatagttggaaacaaataatgcaggaaacagtacagcttggaacaccaggggtattagcgagggcatcaaacaatggaaagattagtagttatactgcaggcgtcgcggatttaaatagtaagaaaccaatgaaatcggattatcgttttcggattggaagtgtgacgaagacttttactgctacgactgttcttcaattagtaggagaaaatcgtgtacaacttgacgattctattgaaaagtggctacctggcctcattcaaggaaatggatatgatggcaatcaaattacgatacgtcaacttttgaaccatacaagtggtatagctgaatatttaaagtcaaaagacgctgacattatgaattcgaaaaaaacgtatacagcagaagaaatagtggaaatagggcttgctctacctccagatttttcgccaggtaaaggttggtcgtattcaaacacgggatacgtaatactaggaatgcttattgaaaaaataactggtaatagttatgcggaagaaattgaaaagcgaattattgaacctttggacttgttaaatacgtttttaccaggtaattcaccagtcatcccaggaaagaatcatgctcgagggtatatgaaaattgacgaaacaagtgaattgaaagacatgacgtattataatccgagtttagctaattcagcgggagatatgatttcagatgcggacgatttaaataagttcttttcatctttgctcggtggtaagttattgaaagaacgcgagctaaaagaaatgcttactacagttccaatagaaggaaaagatcttggtgatggatatggccttgggatctatgagacgaaacttccaaacggtgtttcagtttggggtcacggaggagcaattcctgggtttatgacttttgctggcggagtaattggaggcaagcatacatttgctgtcaatgttaactctttaggtgcggctggtattcttacacagtttaataaaatgatgcaaattgaatttaagaaataaatgaaaagaatgtaaatgggatcctgttttaagggcagtattagtattcatagtatggcatcaagtgtaattcaaacttatagtctggtggtaaaaaaggatgtcggttacacgacatccttttttattgagaatcaaagaggtgtgttttgaattttgaaaattgttatttttgcaatcattccatataatgaaaggtataggggatatacaggggagttatgaatggagaatactttagtttgttaattgtttttattttaataaataaaagtaaattgatttggagtgaaattcattgggagaaaatcagtttagatggagtaacacacaattacgagaacatgttgaagtaatagatggtaaaagaagtccgcacattttatgtaagaacgcaacttatttaaattcctatatgcgcgagtggatgcaagcaaatatttggatctatgatgaccggattgtttatgtaggggaaaagctgccagtgcaactgcatgaatgtgaagtcattgattgtgatggaaagtatgtagttccaagttacatagaacctcatgcacatccgtatcaattatataatcctgaaactttagcgaatcatgcgatgcagtttgggacaacaacttttattaatgataatttaactttatttttcacattacaacgtgaagaagcatttcgtttattagatgaatttgaaaagattccagcaagtatgtattggtggtgtcgttttgatggacaaactgaattgcaaaacggggaaactttatttaatcgtgaagaaataatagaatggcttaagcataaagcagttcttcaaggcggcgaactaacagcgtggccaaaactattacatggcgatgatgaaatgttaacttggatgcaggaaacgaagcgattgcagaagaaagtagaaggacattttccaggtgcatctgaaacgactttagcgaagttaaaactgttaggtacagattgtgatcatgaagcgatgacagggcaggaagctttcactcgtcttatgcaaggttacactgtttccctaagaaattcttcaatccgcccagatttagaagttttactgaaagaattgttggaactaggcgtaaagcagtttgatagattcttttttacaacagacggctcacatccttcgttttatgagaatggaatgacaaacgttatgatttctaccgcgataaaacaaggagtgccagtaatagatgcatacgatatggcaagttataatattgctcgttattataatatggaacatgtacatggttcgattgcgacaggtagaattgctaatatcaatattttagaaagtaaagaaaacccagtaccaattagtgtccttgcaaaggggaaatgggtgaagcgtgacggtgtaaatacacatgaggcattacatatagactggagtaaacataaagtaactccattatcattagattggtcaatagaaaaagaggatatgattttctctaataaaacggggatacacttattaaataacgttattacaaaaccatacactagtgaaatcaatatagactgtgatgaattgtccacagatcatgatgaatgtttccttatgatgattgcccgtgatggcagttggcaagtgaatacagctgtgaaaggttttgcgaaaaaactaggtgggcttgctagctcttattctggtacaggtgacatcattcttatcggaaaaagaaaagaagatatgctaacagcttttcgtagagtaaaagagctcggtggtggaatggtcatagtagaaaacaatgaagtgttacacgaaatagcattaccattgctcgggattatgtctaatttaaaaatgagagaattaatacaggaagagaaacagatggtgaaattactacaagagcgtggctacgcgtatgatgatccagcatttacaattttattcttttctgcgacgcacttgccttttatacgagtaacacctataggattatatgatgtgaaaagtagtaaggtagttgccccgcccgtgaatttgataaagcaatattaaaaggaaagatcctataaaaattttattttataggatctttcttattattagcataagaatattgtaagcctcaaatgatatagtatctaaatcatttgaggtgatatgtaaatatgaaaaaaatattttacattttaagcgtatttattctgtgtgtatcgatacaacacgttgtacattcccaatcagatgcaccagagttatcttcggattgtctcgaagaaagaaaagttagagatgaaaagtatgtgaagaatataatacaggacattaaatccacatttaatttaaatattgatgaacatagtttttgggaagtaagtaaaagagatttggaggctgcccatttgatgtatggtggaaaggaaaatgattcttattataattcgctaactaaaatttatgacagtggtagatttagcgaacagcccagcctatttgtgagggcgcaagaagcatttttactttataaagaacaagataatatcaatgtaatgaaaagcctaaaactagacgttgaaaaaggggaatggctcgttataaaaacgaaaaagaagaaagggaaaaaagtgaaattcaagccgttgcaatgtgaaaaagattatatgaaaaagagaaatgaataacaaaatacttattcatgctattttattcaacgatattttgctgttgatatgaaataacaaaggtaaacgaacatattagctttatggaatatgtttgtttacctttgtttgagagatttaaaaattgggatgttgttagttgaaatttatttactggctaatgagcttatagcattcaatgaatttgttcttcataaacattagattttgtgtcaaatgatttatacattgccgaatcacctatgtatattttattctacagtatttataaaaaatgttggctattcataagaaatataattggcacagtttttgcttgtattacatgtaaggaagggagattgtatgtaaggaatctgtactcgtaatagtataaaacaagctactattgcattattaatcatatttgtatttatggcggaactgtaaatacatacaaataagtggttttttggttttaaaattctgaattttcttttaaattgttagggggcaatggtatggttaaatattcgaaaatttctaagtggattcttggtgtgggactagtgacgataacatgtaatggtttgcaaattcaagcagagacaaaagagaaaaatgtgaagaacgtattacaaatggagccggtaggaatacagaaatctgttgatgaattggcgcacccttcaaaagtacaagaaaatgcatcttttacaaaacgattaaaattagcggatttatcgcagcgtccactagcaccaaccgataatattaaaccgttagctgaagaaaaaaagtattcaatggctgagttaaatcaattaaataacaaacaattaactgatcttcttgtgacaattaaatggtatcaaattccggaattatttcagtttaatagtgatagtcttaaattctatcaagatgatagtcgaatgcaagcaattattaataaactagcagaacaaggacaaacttatacgaaagatgattcaaaaggaattgaaacattagtagaagctctacgtgcagcattttatttaggtttttaccatgatgaattaagcaaactaaatgagcgtagctaccatgataaatgtttaccagctttaaaaacaattgcaaaaaatccaaatttcaaacttggtacatcagaacaaaataaagtaattgcatcatatggaaaattaattggaaatgcatcagcagatgttgaaacggttttatatgcaggtgaaatttttaaacaatataacgataatcttgcaactttcattgaagaccgaacaaaaggagacgctatatatgagttgatgaagggaattgactttgatattcagacggatatgtacacgactggaaaagagccaaaagatacgatgtggtatcgaaatatcgataactttattaatgaaataaatcgttttgcactacttggtacagtaacaaataaaaacggatggttaattaataatggaatttactatgctggccgattgggcaagcttcatagcacgccgacaaaaggacaacaagttgctacagatgcaatgcgaatttatccatatttaggagagcaatactttgttgcggcagaacaaattactacaaattatggaggaatagatgcgaatggaaaaactgtaaatttagatcaaattcgagaagagggtaaaaagaaatatttaccgaaaacgtatacgtttgatgatggtgcaattgtctttaaagctggggataaagttagcgaagagaaaattaaacgtctatactgggcggcaaaagaagtgcgttctcaattttatcgtacagttggtagcgataaaccacttgaaagtggacatgctgatgatgtgttaacgatggttatttataatagcccagatgagtatcaatttaatcgtcaactgtacggatatgaaacgaataatggtgggatttatattgaagggacagggactttctttacatatgaacgtacaccagagcaaagtatttatagtctggaagaattgttccgccatgaatttacgcactacttacagggaaggtacgaagttcagggattatggggccaaggggaaatgtatcaaaatgaacgtttaacatggtttgaagaagggaatgcagagttctttgcaggtgcaacgcgattagatagtgtagtaccacgaaaaagtataattggtgggttatctaatgatcctacaaaacgttatacagcatcacaaacattaaatgcgaaatatggaacgtgggatttttataattattcgtttgcactacaatcatatatgtataataagcgcccagaaatgttcgataaagtacatgatttaattcgcgcaaatgatgtttcaagttacgatgaataccgtgctacattaagcaaagataataagttaaatgaagaatatcaatcttatatgcaaatgcttattgataatcgtgataagtatacaattccacaagtatcagatgagtatttaactcagcatgatccaaaatcgctttcggacgttacttcagatattacgaatgaagcgaaactaaaagatgtgaaagtaacaaagaataaatcacaattctttaatacatttacactacaggggacatatacaggaagtgcggctaaaggagaagttgaggactggaaagtgatgaatgaagcaacaaatgatatgttgaaacgcctttcaggaaaagagtggactggatataaaacattgactgcttattttgtaaattaccgtgtaaataatgctgggcaatttgaatatgatgttgtgtttagcggagtgaatacggaagaaggtacggctgtagaaaaagaaccaaataattcatttgaaacagcaaacccactatctttgaatattttgttaagaggaaccttgagcgatcaagatcagggggataaatttgttattgatgtaaaggatcaaaaagatttacaaatttcggttacgaacgaacaaaatcttggattgaactgggtattatattctgaatcagatctaaataattatgtagcttatgcaacaaaacgtgatggaaacaaattgcttggaaattataatgcaaagccagggaaatattacttaagtgtatataagtatggtggtggaacagggaattatacggtacaagtaaaatagtttactatagtttgttttgaaaggctacttatcgcattttgtagcgaaataaagtagtttaatgttaaacattaaactacttcaatatatccctgttctaattatagaacagggatatattggctttacatttttaaattaaataatctcattggattttgataagaaaataattaatatagatttgaattctcattcgtaaagcatgttttaatcttcttaatgctctttcatttttgtctcaatgtttgttttcaaatcagtggatactcgattgaaataccccaaaacgatcttcctaatatcatcggatataactttcaaatcactagctaagttttcagcgagatgttctttttctattggctgtaacttcgtataaaattcactagcctgcgtaaagttatcctgtttcgttatagaagttctttcaagtttaccttcaacgtaccttccttcaccggttgtaatttgattagcaggtgtccaatcttgctgctggttaatcgttaatttacgaaattcgggaccaattcttcttctttgtgaatcactgtaaatgttagcgcgcccttgcagcattttatcatctgatagttctgcaccatccagtaaattagaaggggagaatgcgactttttctacttgttccataaaattttcaggatttttatttaataccattttcccgactggtatgagaggatacgtttgttcatcccatacttttgtgtcatctaaaggatcataagaaaggtgcgcttcatctttcggatccatgagctggacgtataaaccatactccactggtttaccattttcaatagcatcatataaatctttcccgctataatcaggattttcggcagctagtttaattgcttctttactagtaatgtactgtacaccttcaaacgggtaccaatgatactttacatactttcgattaccttccgcatttctccatacatatgtattaacactatgtcctggaatgtggcgaagacttttggccgtaccattattagagtataaacggacaacaaaatgaatagattcaggtgctttagcgacaaaactccaaaatctattagggtctattaagttatttttaggtgaaggcaataatgcttgaatcgtttcagggaaacgcatcggatcacggacagaaaaaacaggaatgtgattacataaaaggtcaaaaatgccttcttttgtataaaattttgtagaaaaaccgcgtacatttctagcagtatccggtgttcctttcgtactaacagctaacgaaaatcgcaccataacaggaactttctcattagaattttgtaaaaaacttaatttagtatgttcagacatcgaatatatcgtttgaaaataaccgaacgcaccaaatccttttacatgaacaggtctttctaaaattttttcatgaataaattcttgtaacgtctcgtgaagtacactatcttgctctagaacaggtccacgtgaaccaactgtttgtgagtggagtgtagcttgttcattacgttctctatcttcattaaagtcattccctagtaaagattgcccctgtttatcatagttttcattcatcgatatagcctccaaatttatttcgtctattgttactaaatatgattttataaccttgattatgtatgacatgcaaagtagtaacagaccgctagatgaaaaaaatgcacatgtagtggacctgttgaaatagaagaaattatggaaaaatgaatatcgtgaagaaaattactattaaaattttaatctgaaaaataaatttatagagaataaacataaataaacagggaaaataactaggaggaatttaacatgtcggattggtttcaattagataaggaatatatgatgtctacgtattgtcgtacgaaggttgcaatagaaagaggagaagggtgcaagctttatgatgtggatggtaaagcgtatatagacctattttctggcgtcggagtaaacgtattagggtataatcatccgaaaattgtgcaaacaacaatggaacaagttacaaaatcgttgcatctgccgtttcattttttaaacccagttgcaattgagtatgctaagaaattagtggattgctcattaaaaaacggaaaggtcttttttacaaactcaggtacggaagcgacagaaacgacgttgaaattaattgataaatatagagctaatatgaatgaagaatgtgaaggaattgtagtgctaaagaatagtttccatgggcgtacgttaggggcactacattttacgagacaagaaagtgtatatcaaaatttccctgaaacatcgattcctgtatacgaagtagagcgcgaaaatatagaccaattagaagagactattattaaagaaaacccaattgcgattatgctagagcctgtattaggaagtggggggatttatcctttatcaagtgaatatttgcatggtattcaatatttatgtgaaaaatataatgtacttcttgtcgttgatgaagttcaaagtggtatggggagaaccgggaaactgtttgcgtatcaaaattttaatattacaccggacattattcaaattggtaaaggagcaggaggcgggataccgctagggggaattattgtaggtgaaaagttatgtgatgtattttcaccaggagatcacgggacaacatttgctcattcatcaatgggaacagctttaggtttaactgtattaaatacattacttgatgaggggttaatgcaagaagcttatgaaacgtcactatatttgaatgacaaactgcaagacattcagaaagaaaattcttattatattcaggaagtgcgtcatgctggcatgatgtttggaattagtctgaatgatacgaatgaaaatgtgaagaaattacaggttgagctaatgaataaaggaatgttagtcgatgtaacacaagggaatattattcgattacttccgccgtatattattacaaaagaggaaattgatgcatttattaatcagtttatttcttgtctggttaaagtagctgttttaacaattgtttaaaaataaatttcaagttctactcttcagaatacattcttttttgaattgtaatttatgaaaaaaaaactatcttttatacagatagtttttttttcataaatatatcagtagctatgaaatattcttaattatttcttcagttgtgattggtaaaatagtatgtcttcatctaccaaaaaaatgtgtctaaaaggggaataatttgagttattgatttgaattttaaaagttttatttcagaagcattattttatttagtaatttatatattactagacgacatttgtctggtaaaaagccaaaaaataagaatgctagaacattttcaaaaaaataacatacgaatataaatataatgagaatgaggtgatatgttggaatacaaggatattcaattcacgtccttacaaatgagaactgatagatttgggtgggccggtattcaatatacaaataaaaagcaagctattttatttactcgaaatggaggggaagaatgggatattgtcaatcctcttaattctataatattatccatatatccgataaactctcgaagctcttgggcatatggtttaacaaaaacgaatgataatctagtgcctgctatattttatacagttaacagaggggaaaaatggagtgagtttattttaccaattgaagaaaattgggagaaatcgactgatgttcaggtacaattgcatgccacgaatatggatagtatatggattataatatctagaaaactcgcatcgaataaatttgagcataatttgtattatttgaaaactaaaggacaagtatggaaggtaataagaaaaataaatattagtgatagtatatcaggtgtaacatttataaataggttagttggttttatttctctacaaaaaaaatataaagaatcaacgatatataaaacgatagatggtggtagaacttggcaccctataaaaaacaatcagaatattcaagaggttaataacgggaattccatggcttataaaacgatctataaaaataacttgttagcgataccaacaaaaacgaatgataatatattttttataaattattcatttgataaaggtaatacatggcatactccaaatcgaaaaataaacactagtaaagttgctatttcttttttcagtgcacattatggttgggttataaatagtgagaacggagatgtgtatcaagtaaagaaaaaagcatcggaatggataaaattatcaagtaatccgttgttaaaaaatgtattttgtttacattttataaatgagcatagtggctgggcttgtagtaaagaagaaatatttactacaacagataggggtataacctggaagaaagtgttatataaaattaatcatattgataaattaacttaaaaaagagtcctaaaaaattaggactttttttatgatttttaaaaggcgagagttgtaatatacataattagaagggggaaggataaaagcgtaaagcatatattttcaaaaaaatggacgtttgtttttacacagtacaatccatttttgaatatattgataaagtagcaaatttagagggaatagtaatacttaatattttatgttcatattaatgatgccacatggtgtgtaaaaaagggggattgtaatgagatcattaacagttattatttcgtatagtgatagagcacaaatattagaagatttaattaaaaatgtatgggagctaaacccaattgaaattattgttatgctccctaatgatagaagtaaattatatgaaatagcaaagaaatatagatgccgaattgttttgacagagaaatatagtgggcattatcgcggatatgaagcttttataaaggaagcaagaggagatgctttattatttttagatggtaaattttcattatctacagatgaaatgaagggatttattgaaccaattgttacaaatcaggctgatgtaattttgaataaaatagataagtttatagaaatagataaatgtccgaatgtggatattgtatggagaaaaatgttaaatgaaattttaggtcggccagatttaaaatgcaattcaatgctttcattaccatatgtgcttacgaaggaagtattggttaatatcggttgtgattttatagaagatgccattctttctcatatcaagattgtgagtcaagggtggcggattagcgatcaatatgcaataaacactttatctaaagatgaaactttagaagaaaaaggatatttaataaaaaaggaactatcaaaaaatgaaaaagagaaagtgaaaaaatatctaattggaatatctaaagggatagaggaaaaagggagaagaggagggtttactgatgcaggaaaaagaagagatattattcaaaggttaggtgaattaaaacaatacccttgttatcatcaaggttttgggatgcattcttcaatttatggtggaaagcaactttctgtaattataccggtgcaggatgaagaagaaactatagaacaagtgatacttgagactagaaaaatagaaccgctagaaattattgttgttgtaaatgggtcaacagataataccgccaatattgctaaaagtcttggtgctactgttattaaatataacgagcgacttggccataatgttggacgtgcaattggggcacttgaagcgataggagatattctcttatttattgatggtgattttagtatttcaggaagtgatttgcattgctttacgcaagcagtctcagatggtgtagatatagcattaaataatctaaatccaagtttaaatccgcctttttatattgttgatattgtaaagtatatgcttaatttagcatataatcgtcctgaattaagtaatggttcgttagtagctattccacatgcaatgagtagatcatgtttagatgcaataggatgggaaactttattatgccctagccttgctcaagtgaaagctatattacaaggatacagagtagagtgtgtgcactatgtagatgttgtaaagccgaatagaattcgtttaaaagaacatgtagattacactgggcatcctccagcagtattaagaattctgggtgatcatattgaagcactctcctacttaatagaaaagttagattagggcaatgagttatataagagaattggtgaggtgtaaaaatgaagaaattactttccataatcatattagttgaatatgaaataggtttgttaaatgaaattattcagagtgctaaaagtttatttccatatgagattattatagtaataaatgagaagcgaaacataaacaaaaaaactctaactgaatctggagttaaatgtattagaagtgattcagaaaatatgcgtgttataggggcaaaagaagcaaaaggagatatattgttatttttagatgatagtaatagtatttctgcatgtgaacttaaacaatttatgcaacctgctattaaagataatgcagatgtggttttaaataacttgcactctttctttattgaaagacagaaaaaagaatttccaggtgctaatattatttggagacaaattataaatgaagtgttaggagcgaatgaattaaaaataaattctttgctctctttaccaaatataattacaaaaaaagctttacaagaaattaaatatgaaactcttaaaaaccctgttttggcgcaaataagacttattgaagaagaaaaaaagtttagttgccattactttatagaaacacaattggctaaagagttttgtttagaagaaagagcattaaatgaaagatcattagtagatatagaaaagaaaaatatgaacaaacacttagttgctatggcagaatggttaatgaaaactggaattaggggaatgtatcatgatgttacaagaaatcgaaaacttgtaaatattcttaaaaaacataataccatccctttttcacaaaaaggatggggaattcaatcacaaaaatataacggaaaacaattgtctgtaattatacccgctcagaatgaggaagcaacaattggacaagtaatttgtgaagtgagaaaaattgagcccctagaaattattgtcgttgtaaatggttccacagataatacagcaaatgttgctacgcaacttggtgctactgttattacgtataaaaatccgttagggcatgatgtgggaagagcaattggcactgtagcagcaaagggagatattcttttatttttagatggtgatcttgttgtttctgcaaaagatctatatccatttccacaagctattgcagatggatgtgatgttgccttaaatgatttaaatccctttttatgtaaacattttccccttcatattgtcaccttatttaaatacgcgttgaacttagcatgtgatagaaaagatttaggtgtaggttcacttacagcaattccacatgcaattagtaaacaatttataaatgatatcggatgggatatattactctgtccaagcgttgcgcaggtaaacgctattttaaatgattacaagatagaatgtgtacattatgtagacgtaattaaaaataatcggctccgcccgaatgaaaatgttgtagcgaaaggaatttctccaactatatcactcattctgggagatcatttggagggtttctcttatttgttgaatcatagcaaaatgtaagtatattttagatagatgggaagggtgattaaactgttagatcagtataaaaaaatcaatatttcatatgaacaattacagcaaatgaattttcaaactacggaaccttttatactcaaaattgattgggataaagtagcttatgaatttttaattcgtattaagcataatgcttccaatgttattgtttttggctctggagcaggtggttttcaagaacaaccaattggtccacctatttttcatagacattcttggatggaagaatttgaagatactgttatatattataatgatcctactttatatcatggagaaatatctttaggttggggacagggggagttagatagattttatttacaagatatcgcaaatattttaaaactattattgataaagttgcaagttgattcgaaaaatgtgttgttttatggaagttccgggggaggatttatgtctttaatattagctggtttcgtaaagggttccacagctttagttaataatcctcaaacaaatttaatgaaatggatacctgtaccggtaaatcaagttttcaatttatcttatccaggcttatcaagagaagaaattgaagagaaatttggcgaaagaattaacatcacggatttttttaagagtattgaatacgttccaaatatttattttttacaaaatgtcgcatgtgaatttgatgtgcaaaatcacttactaccatttatttctgggttagagcaaatggatgaaaatacggaagtgaatcaaattttagtagacttatatttcgacaagaaagcagggcatgcagctttagagaagaatgaaacgattgaatatataaaaaaggtaaaacctaatcagactgtaagagaggtgaaagaaggagtggaattgtcagtcgttattgtcgtgggagagcaaaagtcgaaattaaatcgaattttagagaaattaaattatttaaaaccactagaaattatcattgtagctgataatagaatgaatactatacaatcaataacgacaattgttgaaagtaatgttgttgttattgaagagaaaaacaaatgtaaagcaccagttaatggggcaagaatagccaatggagatgctgtcttatttttagacggagaagatgttgttttttcagtggagttagcacaatttttaaagccgctattaaaaaaagaaacagatgtaatattgaataacgcagactccgtatattttgaaaaaatgaaaatagagtggccgagtattgctatggtgtatagaaaagtattaaatgacgtattaggacatatggatttaaagtatgattcgatgttatctatgtcatatgccatttcaaaaaaagtaattgaagacattggatatgacatcttacagaatcctatacttgctcaagcaacacttattgagaaagggtggcgagtacacacctcatcagcaattactaaaacctctttgaataatatatctacaaataaaaactctttctctggaaatgaattaactaaattagaagtgcgtgagattaaaaaaaatgtaaaagtattagaaaactggttacaacgaaaaggtgatagaggtaactatacggatggaggaaggaaaagagaaattatagagcaactaaaaatacaaaaaaattatttgcgtttccataaaggatggggaatgaagtcttctatttataatggaaaacagctatcaattattataccagcacaaaatgaagaagcgacgattaaacaagttattcttgaggcaagaaaaattgaaccgaaagaaataattgttgttataaatggatcgacagatcggacagaggaaatttcaaagcaattaggagcaacagtgattgtctatcaagaagcgttaggacatgatgtcgggcgtgcaattggtgcgcaggaggccataggagatatacttctctttatagatgccgattttgctattccagcaaaagatttacatccattaacgcaagctgttactgacggtgttgatattgctttaaacgatttaaatttaaatcttagattccctctatatattgtaaatatatataaatatatgttgaatattgcttgtaaccgtaaagatttaggagtgggatctcttgtagcggttcctcatgctattagtagaaaatgtttagagggaattggctgggatactcttcacacatcatgtattgcacaagtaaaagcaatattagaaggatataaagtagaatgtgttcattatgtagatgtaatgaaaccaaatcgtattcgaccacatgagcacttcgcgacaatagggcatccgccagctgtattaagaattactggtgatcatttagaaggcctttcgtatttattgaagcataggaattttaaagatttatttctattttaagaggtgattcagtcgattaatcaattgagaaatataaatatttcatatgagcaacttgaaggcatttattttaatatggaagaaccgtttttactaagtgtagaatggcaaggaataaattatgagtttattattagaatgaaattacaatcaaaaaaacttattattttgggttcgggggcaagtgaaaagcagtcgccacctatttttcaaagatacacttggattaaggatttcgaagaatctgtaattttttataatgatccaaccctttatttaggtgaaatttctttaggttgggggcaaggaacgatagataggtattacttgaaagatatagcgataattttagaaaaaataataagaaagataaatattttaaaagaaaatgtgttactttatggaagttcaggtggaggatttatgtcccttatattagcaggttatttaagagggactttcgcattggtcaacaatcctcaaaccatattaacaaattggtatactactcctattacacaagtttttcagctatcatatcctaacttatcaatacaagaaattaaagatacgtttgcagagagaataaatgttattgcattttataataagataggctatgtaccgccaatttattacttgcaaaatatagcagctgattttgatatgaaaaatcatttggagccttttataactggattacaagaattagaaaggatagatgctgtaaataaagttaaattagatttatattttgataaacaattagggcacatccctttagagaagaataaaattatgccatatatgaaacaaacgctctatgaagatagaatattgtaattaaaagttgagaatctcttcatgtatttgaagaagtttttacctctttagtttattttatctcactatttgcgggcagtaaaactcccacctcaaaattcggctgtagcaaagaagttaggtgggagttttactgcccataatagcacgattggtgagggttgaataaagttgtaacgatattattattttctcataaattgatattatgtgtaagaaaggagggaatatcttgtcttgcatcaacaagagttgttttaacatttgcttagaatctatagttaatccaaatggtggggcagaaatatttgtaaggtgcaatgatgaatgtccatctaatttcaatgtaataccattcattgcatgtatagctatttcagtaaaggatgattttagtttcttatcttatttagatagtttaataaaacgttaattaactatccaattaatattaaagaagcacctaatttattaaatttagtaagagagttgtatccgaatttaagtaactgcatatattgttaagagaaaggagggagagttatggcatgtactacgaataatgtttgttttgatgtgtgccttaagattacaattacccctggaagtggaattgatgcagtagtggattgtgggggtacatgtgggacaagtcctacaattgtaattagttctagtggatcaattgttattactttaccattaattgcatgtttctcaatctcgctaaacgatgatttaagtgttgcatcttcattaacaagcctctattttcaaacttcttaagaaagatacagaaatgaaaagcctgcctgctacttttcttttgatctaatgtaaaaataaaaaagatggttacaaccatcttttttattttgctatatatttaaaataaattcatatattatttggtggtaagaatatacaattaaaagcattcagtgtttcttttttgttcgatgaggtaagaaattgcttctatatgatcaccaatgatttgttgcgttgctaatgaaagaaaaccttcttgagagaagtgtttttctggtcgaacacgattcatcttatcaacatcgacagaatgggcatttttcacatgaaggcctgctaaaattgttttaacttgacttgaggtaggtgaaagaagtgaatcaaaaccaattgtatcaatacatttgcgactaaaagcatgaggcacagcaattgtggatcccatccctaaatcctttcgattacatgctaaattcacaacatatttacatgcggtcacgatagaataaggaaatcgatacatatagtaatactctaacttatttaaagctaaatctgtaccattttgaacagattgtacaaatggtaatagatcagaactaggaattaagaaatcaccatctataaataataatatatcaccttttgcaaaacgtgcgccaacagcacgtccagtatcattaccaagtggctctttgtagctaataactgttgcaccacaattctttgccaatgcctctgttttatctgttgctccattaacaataatgataatctctaaaggttttaatttttgtacctcataaattacagattctatcgttttttcttcattttgaacagggatgataaccgataattgtttatccccataagtattcgaataaaattctttacctgtacttatttttggcatatatttttgttcgccgttttgaagccctaaaataatatcccgccttcggctactatcagtgtagtttcctcttgaatcttgcgctatatttatccaatgttcaatagcttcaagatgataacaagtgagttgttttgaagggaaggaggggatttgaggtatataaatttttagatgattgcaaatctgaaatttatatttaataattttcatttgtgccaatatcggatttgataaactttctggagtaattgcctctagaactttttttgttattgcatagggaggaaataataatgagttaacatttaaatctgaacgatgaaaaaaatgattcgtaacttgctgccacatcattgctatattaggccgttgcttcttataaaaaaaataatccaaattatttaatactacatcagcggatccgtctagtaatggttgaagaaattgtataagtgtggaagattgaataatgtaattttcatctaaaaataataggcaattacctcttgccttttttgctccaattgtataacaaatattatattctgttgattcttctagtgtaataactttacaactgtaagatcgtgtaatatcaatacaatcatcaatacatccgttaataataagaataacttctaaaggtttcagttgttgacatgcttttagaatttcgggtaaaacgcttgtttgatgctgtatggggataataatagagattggatttttacacataagtagtctcctttttaatcagaggtagttattaataagaatagataaaataggagataaatattttcttgttacaaacatagcaattatttagttttatctgcctccgaattttcattaactgaattagaacctttgtttataccagaagctattaaattattgagaacactaagatctaattgcatagggattgagttttcggatgtagttttctcattttctttttttgtagttaatattgttcttatggtttttatttctttatattgttttaagatgatgaaaaaaccagaaatgattaagagaaaagacaaagaagtaagcaaaaatattatctccaacataaaatatcctccttcaaaaagaaaattataataatattatctaattaggtatttaatgatactccatatttttatggttgaatgcaataagaagaaattcgtattaatgagttcgcttttctaaatatatgcaaaatttcagtaaaagttactggtttttaagttagaggaaataattataggtacgttgtacaatctaatgaattaaagatttatttgtagtgtaaaggtatatattatataagctacacgtcattatataaaagttaaacagggtgtaactttatagaaaaagagcatttaattggacaaataattaattatgtgaaataataataacagataaggagacgttgtttttccttaagtgcttcgaattaattttattcaataagagaaggtgtgcttaaagaagttaaattaaataaggagctgttttattatatgcaacaaaataatgatttaaattttgaacctcaagacgttaatattgtcaatcctaaacaagccaggaaagcagtaattgctactggtatagggaacgcaatggagtggtttgacttcggattatacgcgtatttagcggtaattttaagtcaattattcttctcaggtgttgataatagtggattgcaacttgtacttacattcggtacatttgcagcagcctttctcgttcgaccaatcggaggtgtattctttggtagaataggagataagtacggccgaaaaatcgtgttaagtactactattattttaatggcactttctacattattcatcgcattactaccaacctatgaacaaattggtgtatgggcaccaatactacttttagttgcccgaatgattcaaggcttctctacaggcggcgaatattcaggagcaatggtttatatcgcagaatcttctccagataaaaagcgtggtatactcggtagtggtcttgaaattggaacactctcaggttacattgctgcatcggtaattgttaccattttgacgttattgttaacagatgagcaaatgctcagctggggatggcgtattccattcttaatagctgcaccaattggtttggtcggtttatacttacgccgtcatctagatgaatctccaatctttgaagagatggaaaaagcacaagaggaatctgaagacaatgaacaattttcatttatggatattattaaatatcacaaaaaagacttcttattaagcacagtaattgtcgccttctttaatattacaaattatatgattctttcgtatattccttcttatctaactcaagtacttaaagtcgaagaaacaacaggcttattaattatttctattacgatggcacttatgattccactagcactatatttcggtaaattaagtgataaaattggtaataaacgtgttgtgcaaattggtttacttggtttaactgtatttgcaattccagcatttttactaataggtaacggacatattgcagctatatttgcaggtattttcgtactaggtttcttcttaagtgtatatgaaggaacattaccttcattattaccatcactctttttcactgatgtacgttatcgagcactttcgatctcatttaatatttctgtatcgatattcggtggaacaacaccgcttgtatgttcatacttagttcatgcaactggtaacccgctcgcaccggcattttatttagcaggtgtaagtattattggattagttgtatttagtgtactattcgttacgacttcagggcgtgcgctaaaaggttcatatcctacagtagaaacgaaaaaagaagcacaccaaatcgctaaagaagatcctgaagaaacactttggtggcatgaagagtcattagaaattgaagcagggaagaatgcttccatttaaaaagcaacgtagaagtataaaaagactcctatgaatataggagtctttttgttacgttatttctttcgtttcttcaaacttttttgatatgcataaagcttatgaatctcttccataaattcatgtagaagtacagtgtttgcaccatttgaataccgcaccgtattataagcatctataataatatcactttgaatatttacatcttcttcatcgtttattctttctagccaagcctcaacagtttctccccgttttctatttaaaggagaggttaacttactctctagcttgaaaatttccttccgaatttcgttatgtggcggtttatttcgtttaaaacgattttggcttattccttctttatcagtaatgatagtagattcgaaggcgggcatatttggtaaacttaaatgttttcgtttttttactattttccaaacgacgtaaatagcgatagctgtacagactattattgtagcgctatttatgagtattggatcaaaatcaggaattttttttccgtcttcaattttgggttttaagagatgtcctttatttgcccaaacatcttcagtatcttttaattccgctgctttaattaatggcattaaagcatagccgacgcctaatgcgactacttccgttataaaaccaaaaataagtcgaatgaaaggaaatacttgaacaattaatatactcattaagccaatcgtaatgatagaagcaaaacgtaatagttgttgtttgcgatttgccccggttaaccaaaatgtaatcataagatgcaaggctaacattaatagtttccacaacggtggaaagggtgcataaaatatagctgaaacgacaaaccatacaataccacctaaagatttttgaactggatatccaggtccgaccacatgtacgataaagaaaaatagtggtaatatgattgtgccaaaaagagaaaaaggtaaaaataaagagaaaagaacgatttgaagaactaaaagtattacaaatcctgttgtttttttctgcataaatttatgaataagaaatactccaatatagcctgttgttaaaaatattgcaatactaattagttcatctctttctgttaataatgaaagcaggaggagcagaatgaaatcatgaatgtgatatagccaagttttcaactggttccaccatcccttcactagtaatgagaaacgttggctgcgagagaagagggagttcatttttttgtaaaccaatgtatatcattgtagacgatcgttctctctttctctttacataatgaaggaatccttgtttcggaagtaacgtactatcatctgaaatacgggctaattcttctaaagcttttgcatattgtgtttgtccttcatttaacggtacatgtaatgcaccgccttctgctaatacactaataaacaattcaaacggaatgtggtgcttcgttgtgtactggaaaatgtatgttgcatatgaaataagttcttctacattatctttccaaccaaatccacgatcggcagctaaagaaagacaaatcgtccaactataattttttacaggttcatattgcttcgcttgtaattgttgcattttagcagatgccttccaatgaatagagcggaaagactcacgctcatatcgctttacaccgataatagatgtttcatcattgtaaaaagaaaaattcgttcgataaaatccattcaaaagttgctgaagttcttgcaaacctgctacttctttaggagaaggatacacaataatttcagtccttaatttatcaaaaacaggtaaatgtacagttaatagatgaaatggatcttttaatacacattcaaactgttcaatttgaaacacaccacgcttcgttgcggttaatgttaaaccccatttttgtgccgaatgtgcgggttgtgaaaatgggaaagagaataatgtttttgatatttgttcaatgccttgctctttatgcggtataagggacgaatttaaatgaaagtaacaaacaccattaacgagcggtatgctggctccattttttaaatgaataaaaaactgtccagattcctcaggaaaaagccgtgtagtttgtttctcatttatgatttgaaacttcttctctatgaaagcgacatatttataaataaaaatcgcaaatatataatagaagaaaaagagaaacataagcattcgttgcgggaaaaagaatgtgaaaagtaacgcgattggaacggttagttgaataatatggagttgaaaaaataaaggcacagttacaacacgctgtccattcatgcttgctcaatctccacaggtacgtcaacttcttttaaaatactttgcattatatcatttttagtcgtgcgcagggcaccttccattgataagacgatacggtgattccaaacagaaggaactaacaattgtatatcttctggtgtgcaatattctctcccgcgtaaaaaggctaaagcttgaacagcacgtactaaagctaatgtggcacgtgggcttacaccgttagcgatataatcatgatttcttgtagcatgagcaagtttaataatgtaatgttctaacggttccgaaacaaatatttcttttactcgtttttgagattctaaaatatcttctaatgagatgacagatgtgacactttctaatggtaaatcgttccgaaaacgtcgcatcatttgtagctcatcttcaggagtaggataaccgattgaaatcgtcattaaaaagcgatcaagctgtgcatctggaagagggaaagtcccttgtgattcaattgggttttgcgtcgcaataacaaagaacggtttcggcagaggcgtagattgtttttcgagcgtcacttgtcgttcttccatcgcttctaacaaactcgactgcgttctcggcattgcacggttaatttcatctgctagcaaaatgtttgtcataactggtccaattcttaattcgaattcgcttgtttttgggttgaagtattcaatacctgttacatcacttggaagtacatcaggggtgaattgaacgcgagaaaaactaccaccaatacttttggaaatggttttcgccagtaacgttttcccagtaccaggcacgtcttcgagcaatacatgcccaccagcaagaagtgaaacgagcagtagatcaataacattttctttcccaacaaacacagatccgatgttttctttcaatttatttatcatatgtaccattcctttcattataaaagagctaatatttctatattttaacaaattattcagaaaatttgtatggttttttaattcaaagaaatggatatttaattattaaattactcttgcatattttggaatatgattatacaatatcgatatgcgatgtatcgtaagtcgatatatcataaggcgatgtatcggaggtagttataatgaatgggaaggcgcaaaaatatattccgttaactgaggcgacatattacatattattgtcactcgtgaagccgttgcatggctacggaattatgcaaatggtagaagagatgacaaatggggaagtaaagctcggccctggtactttatatggaaatacgacgaaattactaaaagagaagttaattgttgaagttgcctctacagacagaaagaagtgctatgagttaacgccgtttgggagagaagtgctggaactggagtacaatagattgcagagatctgtaaggaatggaaatagtatattaggggagtgaatgggaaatggagacaaagaaggtattcaaaccttttgcgatgtaaatgtcaagataaacatgtacattttcgcttgtttaagcatgtacaaaatcttaaagaaaaaatctaagtctgaaataggacttaaatattaatatacgaggaggaaaatcaaatgaaaaagaagtttgtacccggtattgcatcagttgtaggagtaagtattttattaactggttgcggtagttataaaaacgaagcaagcggagcaaatgcaaaagacgaggcacctagtaaacaggttttaaacttatcttcacctactgaaatacgaacaatggatacggctcgtgctacagatactgattctggtcaagtaatgagaaacgtatttgaaggtttgtataatcttggtgaaggtaacaaacctgttcctggtgttgcaaaatctcatgaagtaagtggcgataaaacgaaatacacattccaattgcgagattcaaaatggtcaaacggcactcctgttacagctaaagattttgtgttcgcttggcaaagagccgtagatccagcaacagcctctgaatatgcatttctattctttgatattaaaaacgcaacaaaaattaacaacaaagaacttccagccgaccaacttggtgtaaaagcagttgatgaccatacgtttgaggtagaattggagcgtcctgttccgtattttattagcttaacagcgttcccaacatttctaccaattaacgaggaattctttaaagcacaaggtgataagtacactttagaagataatacaatcttgtacaacggagcttttacactaagcgattggaagcacgaacaaagctttaaattcaagaaaaaccctacctattgggataaagatactgtcaaactagaagaaatcaattttaacgtcgtaaaagaaaaatcaacagaagtaaatttattcgagtcaaaacaattagatcgtataaaactaacatctgacttcgtcgataaatataaaaaggatgctaactttaaagaacgtccaaacgtaggcgtacaatttttacgtatgaatcaacaaaacaaagtgcttcaaaacgtttctgcacgccaagcaattgatcaaacaattgatagaaaatcctttgtaaatacgttattaaatgatggatctacaccaacatttggtctcgttccaaaaaactttgcaaaaggacctgaaggaaaagacttccgtactgcaaatggcgatttaacaaaagttgatacaaaatctgcacaagagttatggaaaaaagctaaacaagagcttggttctgaaaagataacattagaattattaacgagtgatgctgaccttgataagaaaactggtgaattcttaaaaggacaactagaaaagaatctagatggattaacagtaaatataaaaccgcaaccgcgtaagcaacaagtttcgcttttattaaaaggtgactacgaaatcggaattgatggctggagccctgactttgcggatccaattacattccttgagctatttacaacgaataacccttataacttagatcattactctaataaggaattcgatgaaacaatagcaaaagtgaaaacaactttagctggtgatgaaaaagctcgctgggaagcattactagcatccgagaaaatattatttaaagactctgttatcgctcctctttaccaaaaaggcgaatcttatttagaacgttcttatgtgaaaggaattgtgcaagtagactttgcagggcaattaaacttcaagtgggcaaaaattgaaaaataaagtgaaactttaataagtgggggtttcttcatccccacttattattagcccacaccaattgtttttttagcaaaatatattaaaaataggttctctcacacatgagaatccgctttttcaatatattattctaagaaattaacaatctatttttattattgacatatagttctttccagtgttaatattctaaataatcaaagaaacgaaatatttcaccatcaaaatataatgtctactacgttgaaacatataacgatagattatagatcaacatgtatatacatatagaacacctgattacctataaacaaatatttataataggttttatctccttctataactacttcaagacatggacattatgacgttacgaacaacacatttagggaggaacgaacaatgaagaaaaaagttatacctgttgttgcatctgttttaggggcaagtctattactaactgcttgcgggggaaataaggataatgcaagcggagcgaaagcaaacgataaagcacctgataaacaggcaattaacttatcattcgcttcagaaattccaacaatggatgttgcaaaagcaacggatggggaatccatgaacgtaatgcgcaatgtttttgaagggttatatgcaatgggagaagataataaaccggttcctggtgtcgctgagtcggttgacattagtcccgataaaacaaaatatacattccatctgcgtgattcaaaatggtcaaacggtactcctgttacagcaaaggactttgccttcgcttggcaacgtgccgtaaatcctgatacagcagctgaatacgcattcttattcttcgatataaagaatgcgaaacaaataaaccaaaaacaattgccaattgatcaactaggggtcaaagctgttgatgacaaaacgttagaagtacaactagaccgtcctgttccctacttcttaagcttaacgacattctcaacattcttaccaattaatgaagagtacttaaagtctcaaggcgataaatatggtttagaaacaactcatttaatttacaacggtgctttcacattagagaactggaaacatgaacaaagcttccaattgaagaaaaaccttaactattgggatgctaaaactgtaaaactagaagaaatcaacttcaatgtcgttaaagataagtctacagaagtgaacttatatgattcaggacaaattgatcgtgttgctttaactgcagagtttgttgataaatataagagcgatccaaacttcaaagaacgcgctgaagtcggcattcaattcttacgactaaatcagaaaaatgaaacattaaaaaatcaacatgcacgccttgctattaacggcgcaatgaataaaaaagcttacgtagaaacaatcttaaataacggcgcggttccagctgaaggaatggttcctgcgaaattcgcaaagagcccagaaggcaacgacttccgtaaagaaaatggaaatctagtcaaggatgatgtgaaaacagcgaaagaaaactggaaaaaagcaaaacaagaacttggtactgacaaagtaacaatcgaactattaacaagtgacaatgctttagctaaaaagactggtgaatatttaaaaggtgaattagaaaagaacttagacggattaacagtgaacttaaaaccacaaccacgtaaacaacagctaaaactactattaagtggtgactatgaaattggtattgacggctggggccctgacttcgctgatccaattacattcttagatctatttacaacagatagtgcttataacttcgataaatactctaacaaagagtacgatgagctaattcataaagtgaaaacagatttagctggcgatgaaaaagcacgctttgaagcaatgaagcaagctgaaaaaattctattacaagacggcgctgtcgctcctttataccaacaaggtcgttcttacttacaacgctctttcattaaaggacttgtaacaactgacttcggtggtgaatttaactacaagtggacagaagttgcaaagtaacaaaagtaaaaggtatcccacgaaggatacctttttacttttatacaactttaactacagagcttcctcttccctttgccattccttttatagctaaaatcatacctgctactaattgtataaccaatacaataactaataatgaaataatatttctttctaaactaactcctccaaatattattgtataatagccatttcctgcatatattgcaggaaataattcactgattgtttggtatgttttagaaagcatttcatgtggtacaattacacccaaacttacaagttgtaacgatagtgagatgatattgaaaatcatacctgcatctccaaaaacagttacaaccatttgtgttaatgaaagaaaggcgaagaagactattgtcaataatcctcttttccttctttttgcattgaaccaaaactcattatacatataaacacaaacatcaaatatgttctccacgtcaaagaaggtatatgccctgaccaaagatacctaactaaataattaactcccataatacaagacgatattactaaacaaatacttattagttttacatatttgagcatatcttttctccttattctttatttttctacttcttcaaattgtagattcaccggctcttctaaaagtgtttcataaaagttctctgccaaatctgttgaaggaattttttcatctacttcatcaaatcgaatactatctagccacacacaaccttctcctgataataaaacaccaaatgcaataccaagtgcttcttcttttatatctaatacaaccgagtacgattgccagttattcgtatttttaatggggcgattttgcatattatccatagcgagcgattctgtatcttttccatctactcgcatccacaatcctgcccaatctcttacattttcactcttaataaatgctgtaaaacgtaatctctttcctacatatttatccgctcggaacatttgcattaatgttgaaaatcctccgtgcgtaacattctcttttgcttttatgtatgcagatactttcccctgatggacaacttcataatctaaacccatctcatattcagcaggatgacttccacttaagatccatcctttcggtatacctttttgcattgaaacaccctctctttctatataaaatgactgaaagtactttcgatatttctttggtggcaattgaaacattcttttaaaagctctcgtaaatgcctcttgtgaggaaaaaccgtattgcactgcaatatcaataacagctctctccgttgacactaaaacttgcgcagcatgagttaaccttctctttcgaatataatctgttacactcatcccaacatatctttgaaagatgcgatgaaaatggtacatcgatactgcactgtgagatgccactctttctgttgtaagctcctcatgtaagtgattctctatatattcaattgatttttttattatctctttatattcttcatgcattttagcccctcctcacaacttcaatttaccatatacatacaaatcttttttgatttaaattgcggattagcccttgcaactacagaataataatttattttcaacacatacataattacatgtttttgggaaaaacttgtatagaacgaatttacataaggaggaatttataatgagaattctactatcagttttattagctcttatgctagtacctgcattaacaggatgtaaagctcctgcaaaagaagacacaacttctaataaaaagacgactgaagaagcaaaaaatgaggctcctgcagatttaaaactaaacttcaatgaattcgatttaaaggcagactaccaagatacaaagaaagactacgaagcagactataaaaatgtagcagctgataagaaaatggaagcaaaaattgaagatcataaagcagatgtaaaattaacaggagacgaggctatcacaaaattaagcccactcttacaagaattaaaatttgataaaaatactgctgaccaagaagtaatcgatcaagtagtgaacgtgttcaaacttgataaagactatcaaaaatttgatttagaagttgtcttctctgatggaacgaaaaaagaatacaaaagagaaataaaataaagaagtaggcggtagtaagaagaaaaaataaccttgcacaggcaaggttattttttcgtttctgcttgaaaacgtttatagtatgtcgatgctgttgcaaaattaatttctatatcacgaatcaacgatgaatcttcttctttagctaacttctgtaattttttcatcgcttgttccgattcattcaagaaaccaacatatacttcatgttcttgctctttcgacttcggaacacgaatttctttacgtatatgatcaatatcttctaacatgctcgttgttaccttttgcacatcttctttatatgtagcagtcgttatttccttaccgcccttttcttttgctacttcaaataactgcagtgctttattaatttctttattcattttcatatcgtatttttcatgtactgcacggtattctttcatctcttctgtttgttctgtagattgctctaccttttctttcggttctttcgtatctttatttccattacaccctgctagaaggagcattcctcccattacggcaatacccaaaaccttcttcatctcttcttctccttttatctacaactattactcattatagtttcttttatctccacttgttattataccgagaacatcctactttttacacttaagacgacaccgtaatatatatataccaacatgtttgtcacagtatcgtcactttatacaaataacttttgcaatgctttactacatcaccttacaaaactgtatgaggtatttcaaagaaatgaaaaaagaactgattcaaacattccctttgaatcagttcttttttgttaagcctctagattttgtttttgctgcagttcaaactgtttctcacttcttctggccataaatagataacataacactgctcctacttcacaaagcgcaataacaatacccatcggtaatgctgtattacttccaccgatacctactagcggagcaacaagagctcctgaaataaactgtaataaacctaataaagctgatgctgttcctgcagcttgtttctgatttctcatcgctaatgagaacccagttgttgatacaaccccgacacttgatacgacaaggaataacgaacataaaacaccaattaaacctattcctagtacgattgtcagtagtaaagataggccaccaacagctgcgataataatacccgcaacaaataatgtcttctcattcactttccccgctaaacgacccgttacctgactagcaataataataccgaggccattaatcgcaaagaataaactaaattgctgtggtgatgctccgtatatgttctgcaacacaaatggtgagcccgaaatgtatgcaaacattgccgctgttactaatccttgtgacaatgcatatcccataaatagacggtcctttaacaattttccgtacgtcgccaaagtccctgacaaaccacctgtttctctttcttcaggaggtaatgtttcacgtaatacaaaagtagctgagattaacatgaatacgctaattgctccaagaacgatgaaaacaccgcgccacgttgtaaactgtaacaattgccccccaataatcggtgccaaaataggtgctgctccgtttactaacataagcagtgagaaaaacttcgtcatttcagaacctgagtacatatctcttaccatcgcacgtgatataacaatcccggctgatcctgaagctccttgtaggaagcgcaataatactaatgtccaaatagatggcgcaacagcacaaagtaaagaagaagcaacataaataataagagcaataataagtggtttgcgtcttccgtaaatatcactaattgagccaacaaataattgccctactgacaacccaagcaaacaagctgttaatgtaagctgcgctagggatgcacctgtttgcaagtcatccgttaacttcggtaatgaaggcaaatacatatcaatagataatggcccaatcgccgtaagtgtccctaatacaagaatcatccacaacctgtttgcctttacaggtttatatatttcgtgattaacttcattcactttttcaattcaccctttcctatacacactgaatcgtaacaattatagttacatcataaacatacgtcaagtacagtgcattttcctctttcataatgtaaaaaaagcgatagaaattctaccgctttattttttcacattgctattcgtaaatttagataccgaggccatcgtctctcccgtatctaaatatgtaatttgaattggatctcctacttctgtaaacatagcatatgggaatttcttcaccggtatcataaataccttttgttcattttctaaaagtacgtacacgattgtattttcacctgatttttctttatatacacgttgtacaataccttctttttgcgcttcttttcctgttgaggttggtctaaatgtatcaccattaccgctcattacgtttttataattctcaagcgcttctttctgcgaagaacctgtcgcaaatatttttgcattagcagcatatacaactgtatgcgcacgtactaggcctccgtcatcaacaaccggaataatccaagctggtttaccgtatacgttataaatgacaggcattgtcccatgccatttctctctcttaaaggaattatctactacttctgtagctgctgaaccatccataatcccctttacttcttttccattatagtaatatagcttgcctgtgcgtgcatctactaatgaatagcctagagctgaatctactccttcttttggagaagtaaagtctgtaaaataatacagtgttccatctttaccaaagatcggggtcacgccttctttcgttccccactcagtcggaattttcatatctgtttgcgagaatttcgtattccaaaatccgtgaatatatttgccaaagtacgtatttaacgtagatgcagtctcatgatttaatacaccatcaacaaatttaggtgcctttcctttatcatatcttttcacttcacctgtttgtgcatctactacgacaacaccttctacctcaaatccagatcttcctgaaataaattcaccatacgtcattgtataatatggttttcctttatcatcaacctcaaatttaggttttcctttaaagattaaatttggttctgcttgccttaccacacgctctaaattattaccaaaaaacatgcttggcacatatttcattttataaccgaggtgcagtttcgcttccgcatcaggattcgtacctgacatcgttacgtaccctggaattgtctcagctttacgcgctttaaaaaatcctgaaacttcaatcggcgctacatataaagcctcgccgtttaccatttgtggcgttaattctcctagctcaaaataagctacttttggaatatcaccaaatacttttttcatcttattctccgctgtctttggcggcactgtaaacggctggtcattttcagtaaatggctctgaaatatctttctctaccttaacaacagaatcatatttcttttgcgagattactatatcgtgcaaataaccaaagtagccgtaacttgcgagtaaaataaacattagaagtccttttaatgtaccttctaatttccctatttgatcttgtgaaaataaaacaagcccaattaaaattgctactgcaacagaataatgagtaagaatcgaatctactcgatcatcaattagccaaaagtattcatagattgcaatacctatccaaaataaaacaggaataactaaaatagatgatttcttaccctttacaaccttcttatctcccttcttatccactgctcgaagcttactactacttcttgtccatggaatcaaaaacaaagtaagaatagctaaaactacaaatttcatcaaaggcactgtccccttttcttttgtattcccttttagtataacaaataaaggttattaaggtgaaaataggaatagttatatttttttactacttaatacaatcccgctcactacatatagaatagatgcaatataaaaaattgtaccaatcgtaaagaaatctactaaatatcccgtggcaataaccgctactgctccgccaatggatgtccacacatggtattttccaatctcataaccagccttttcctgcgcaacctttcgtgctaacgaagtcttctcagtattacgctgcacagcacctaaaacgcccattacaatttgaagaatatacacatgccaaacttccgtggcaattggaaagcaaagcattaagattgccatggaccaagcgtatatgattaataattttttatcccctacttgatcagatacctttcccactagtggatatacaagtgctgatgttaaagcaaataagccatacgcccagccaaattgcgagaagctatttccaacgtttcgaagcaataatatataaaaaggaaataccatacttcctgccatcatgatgatactttgcgaagccacaaatcttctatatgtcatttcgtatactccctataaaataaattcacaaatctctcttctgaatctatttccttctttttcttgagaaattcttcaatgcgaggatatgccctctttaactgctctttcgttggataagaataatacggcaaatagtaactaccattatgctttaaagtaacatcaatcatctttcgaatgacatcctctgttttctttatctcactctctgagcgtccctggttaatcaaaagaaccagcgcaaacatatcatctttcgcataggacaaaactgcattttcattcttttccacgtaacgaatcgtaatgttgagtaaattaaactcatcttcatttaatacgttacgtaaatcatctatatactctgtgaaagcatctataggtacaaagtattcttgtaacacttcggtcctatttggattttcatattccataaaagcactatctgatctcataacattattacgcgtctcatactttccatctgtacgttcaaaataacctctttgtatatcccaaaatgtattctttccccaatcactataacgtgataacccaagcaaaaatttcggtgcagctataatattttcttcctttaattcactgtactcttctctcatattttgattttgtgccaaagtataatctgtcacatacatctcttttaaaaatgaatttggagcaacagaaatacgcgctaagtgcatacgaacattctcatctcttttcactttctctttgaaataagatgcgtattctttataatctatcattctcgtgtgcatttcatataattcatcatctgttaacttcagcgtcacatctaaaataactccaaataaaccgtaacccccaatgacatatggaaataactctgcattttcttctctacttacattacgtaccgtgccatctgccattaacaatctaaatgaatctactgtatcaatcagtgcctcatgacgaatatcacgcccgtgtacatttacacttaatgaaccgccaacagtaaaaatattttgagactgcatgacctgtaccgcaaggccataaggatttattttcttctgaatatcattccaggtgacaccactttgaactgtaatccgcttcttctctggatcaaattctaatattttattatatcctttcatatcgagcatcgtgccattcggataatatgtctgtcctccttggctatgttgcatgcctgcgatggaaattttctctcctgaaacttttgcatctcgcactaattttattaacgagtgctcttccgtagcactttcaacacgttttatttttgtcggaagcaatttacctacatcactcataataggatgatcaatttgttttttatacgtatgtacagacgttgcaagcaaaaccgtatatgcgacaatgaccactgctatctttctttttttcaaaggacactctccttattagcaacaaaaagagataccctttctttcaggtacctctcttgacagtgattactttgctgctggcaattgtattggatcaaatttatcatacgatgtaaactttgcatccgtaataatgtgcgctttatcctcaccattgctactcataaccatatctatctttgctgattcatatttaaaatcttttgtaataatatattccccatctatttcttctatctttgcattttggccttgtagcatttttttctgcttttcatccatactagctagcatactctctgtctcttgcccttttaatgcaaacttcagcttataattatctccacttttctccatcttcactttatttaaaatttccgatggaatctctaaattatctaccattccttgagtcgcgttcattccgttagcattcaattgttcctctggtacagacataatttcacccgtattaggatttttcaactgaccagcaattttgccacccacatcataaacaacaacctctgtaccagaaacattcatttcagaacgagaattttttttcttcggctctagttgcattttagcctttattacattcatctctgttccttcagcctttattcccacatcatatgtcatcgttacattttcttcgtttttaaaagcttcattcgctttattaaaaacatccttcgctgttaattccttttctttctgcacagcttcttttttcggttcgtcagtcttttttgttttctcattactacaccctactcctagaccgactgcaagtactaaacttgaaattaaaataagttttttcataacgtcccctccttcccaaaaataatatcatctcttttcctatgaaatctatataattcgtaatatttatctttaaatttatttcctatataacaacatgtttgagaaaaagtttaaatatgatgtaaataataacaactcatttcaggaggtcattatgaaagcgattatttgtacaaagtacggaccacctaatgttctccagcttcaaaatgtagaaaagcctaaacctaaaaaaaatgaagtgttagttaaaattcacgcaacaagtgtatcgactggagattgtagaatacgtggctttaatagccccctcttattttggattcctatgcggatcatattaggtttcagaaaaccgagaaaacctatacttggcgtagagttatccggtgaaatcgaagacattggaacagatgtaacacaatttaaaaaaggagatcaagtttttgcattaacagaactaaaccttggtggttatgcggaatacacatgcgtgcatgaaagtggattaatagcattaaaacctaccaatgtgacatatgaagaagctgccgttattccttttggcggaacttcagcattgcacttccttagaaaaggacagataaaaaaagggcaacgagtacttatatacggcgcctctgggtcagtagggacagctgccatacaacttgctaaatacttcggggcgactgtcacagccatttgtagtagttcgaatttcgatttagtaacaactttaggggcagacaacgtaattgattatatgaaagaagattttactaagcggggcgagcactacgatattatatttgatgcagttggaaaatataaaaagtctctttgtacagatgcattaatgcctaatggaaaatatgtatctgtgaacggaatgatggcaaaggtcagtaaagaagatatgaacctgctaaaacaactagctgaaacagaaaagctaaaacctgttattgatagaacttaccgattagaagaaattgctgaagctcatatatatgtagaaaaaggacataaaaaggggaatgtttcgattatcttaaaataaaatatattccgaaaatatcattgacaattctttttgtacgatttactattagtaccatattcaaaactacatacacatactcttatcaagagtggcggagggactggcccgatgatgcccggcaaccgagcttatgacgtataagctaaggtgctaattcctgcaaaacgagttttcgttttggaagataagagaggaatctatttcgtctattcggcacctctcttatttttgggaggtgctttttattttggaacgtatatgaagggggatttatagatgaaaaaggtattattaagcattgtaagcggagcagtattattattaggcgcatgtagcgtgagttcagataaagaggtaaaagcattagacgagaaaaagattactgtcggtgtaacaggtggaccacatgaacaaatttttgaaaaggtaaaagaagttgcagcaaaagatggtctcgaaattgatataaaagtatttaatgattatgtagcgccaaacgtatcattagatgaaaaaagccttgatgtaaatagttaccaaacgaaatcgtatttagatgtatttaaagctgaacgcaatatgaaattagctgaagtattttcaacagtaacattccctatgggcgtatattctaaagatataaaagatgtaaaagacttaaaagagggcgatgcaattgctgtaccaaatgacccaacaaatgaacttcgagctttaaaattatttgaaaaagcaggggttttaaaagttgatccaaaggctacagaaaaagcgactgcaaaagatgtaattgaaaatccaaaaaaattaaagattgtcgaattagaggcatctcaattaccaacgcaactaagtgaagtgaaagcagctgcaattaacacaaactttgcattaggtgcaaaattaagtccagcgaaagattctatcttccgcgaaggaaaagattcaccatatgtgaactgggtcgttgttcgtactgaaaataaagatgatgccgttgtaaataaattaaagaaagcttatcagtctaaggaagtaaaagagtttatcgagaaaaaatttgatggttcagttttaccatcttggtaggagctgacgataatgattgaattaaaaaacatatccaaagtatttacaacaaaaaaagggaatgttgaggctcttaagtctacttcccttaaagtagaaaaaggcgagatatttggaatcattgggtatagtggcgctggtaaaagtacattgattcgatgtgtaaatttattagaaaaaccaacgacaggaaatatcattgtaaacgaacaagacttaacaacgttatcgacaaaagaactagcaaaagcgagacaaaaaatcggaatgatcttccaaggattcaatttacttaaaactgttaccgtttatgaaaatatcgcattaccgttacggcttgctggcattccaaaagcagaaattgaaaaaagagtagaaaagtatttacgcattgtcgatctttttaatcgaaaagatgcgtatccaagcgaactttctggtggtcaaaaacagcgtgttgcaattgctcgtgcgctatcacatgaacctgaagtgttattaagtgatgaagcaacgagcgcattagatcccgaaacaaccgattctatccttgatttgttattaaagattaacgaagaaatcggaattacgattttactcattacacatgaaatgaatgtcatccagcgtatatgtgaccgcgttactattatggaacatggatctgtagtcgaaagtgggactgtaaaagatattttcacaaacccacaacatgtaaccacgaagaaatttgtaaatagcgcatttgcagcgaaaattccaaaagaggtacagaaagaactacaaagtactggagaaattgtaacactttcatttattggcactacttcaggggaacctgccttagccgttgccacaaaacgtttccaagtgtatccgaatattttatccggtaatattacgcagttaaaacatgaagcatatgggaaactagtcgttcatatgcaaggggaacaaaatgaaatccaccgtgctttatcatttttacaagagcaaggaatcatcgtagaaggaggtagaacagattatgggaaacaagtcctttttggatgaatggggtaaagtcatatgggaagccacaatccaaacctttcaaatgacatctatctcattactcatctcgatccttattgcattaccacttggcgtcacacttgttttaacgagacctggtgggcagcgtgaaaataaaatcatctatcctattcttaatacaattattaatatcattcgctctcttccatttatcattctattattctttattttaccttttacaaagtttctaatgggaacgtccattggcgtgcaaggtgttatcgtaccgcttgtcgtcttcacagccccttatatcgcacgtttaatggagacagctttactagaagtcgatcgcggtgtcattgaagcctaccaagcgatgggcgtttctactataaaaatcatttggcacgttatggtgaaagaagcacgtccctcccttgtactcggattaacaatcgcaacgatcggcttaatcggcgcaacagcaatggctggccttgtaggtgctggcgggctaggggatttagcataccgcttcggacatttacgctacgagcctgaagtaatgtatgcaaccgtctttattttaattatcctcgttcaaggattacaatctttagggaatggtgttgcacgaagattgaagaaagattaaaaaagaaggcatctcaccctggtgagatgccttcttttttatcttttaaatccaccttctgaatgaataacttgcccagtaatccactcggcctcttcacttactaaaaatttaatgagtctagctgcatcccttggctcaccaattctgccaaaaggaaacatcggctttaacccttgttttatctcttcagtcatccatcctgtatcggttggtcctggattaattgcattcactgttattcctaaatgagctacctctgctgacaacgtactagtaagagcatcaatagctcccttcgttgtcgcataagctagttctcctgccataggaccttgaaattgccccgaagtaatattaacaattctaccaccagatttcttatcaaatccccgggaaaattgactactgagcaatgtagtcgcacgaacatttaccatataatgcttatctaattcttcagcagtcaacgtagagaaattattattcgtagaatatgctgcattattaattaatatatgagggtaccctaattgttcagtaactttatttataagctcttttggtgcatcattctgagttaaatctaactccatacttgatactttaacaccgttttttagtaactcttcttttaattgtatttgttcatttttatcaacgccccaaggcatctctttatcgtaagctgtccaatacgtaaaaaatatatcgtatcctgattcagctaattctttacaaatcgctgcccctataccatctagacgacttacccctgtaataactgctactttattttttaattggttcatcatatactcctccaagtttaaaggacgcatattttatataagagatataaactttcccacaaaaaagacagatacataaaataggcacctatccttataaaagggatgtacaagccaaatatgcattccttgaatgatttacagataactaaataaaccctcgcttatgagagcaaaatttatctatctagtagtttctaatcattacaagttcatccacatattgagtctttgtctcctttacatatatctctattcttagtttatcaaagcagataaaatgttacaaaaaataaaacaattattcacaacctatccttgttcacattctctccattgtgaatcttttcacattggatatataataaacgtgtaaatacaatattggagggatttcaatggttatcaattttttaagaactgataaacgtgctactttcatattattacttttacgactttacataggatatacatggttcgctgctgggataggcaaagtcttcggacaatcttttgacgcaagtggctttctaaagggtgctattgctcaagcatcaggggaccaccctgcagtacaaagttggtgggcagatttccttcaacattttgtccttccaaacgcagacctatttagctttttagttcaatggggagaaattttagtaggtctaggtttgattttaggcggattaacaaaaacagctgcatttttcggaatcataatgaatctttcatttttattaagcggaactgttagtgtaaacccaaacctgcttattttgactatgttcattttagttgcagggcagaacgctggacgtattggattagatggctatgttttccctaaacttttccgtaaaaacaaccacagaacatataaattaagtaaaactgcgtagtaacaatttacttttaaaatataaataagaaaaagagcctgaatataggctctttttcttatttatcctaatttaaacttttaatgaaccacgaaagcctctggcagcatagtaagagtctgctccattgtggtacacgaaaacatgtccaaagcgataatcgcaaaatagagcaccaccaagctctctaatatctgaaggtgtttgtacccaactcgatgatttcatatcaaaatctccaagttgttgtaactctcgatattgttcttccgttaataactcaatacccatagcggccgccacatcaatagcgttattttctggtttatgcttttttcttgattctaacgcttcaagatcataacaaagacttctgcggcctttaggactctcctttgaacaatcatagaaagtatattcgtccttttcttcatcataaccaataacatccggctcaccaccagttacttccatttcgttaagtgaccacaatttttcattattagtagtcagctttgcttcaactttagcccattcaagaccttcatggcggttcatgtttttctcaaaacgagcttgcaatactttcaataactcttcacgtttttctactagtaagtcatttttatttcctgtcatattagtcctccctgatgtatgtactgatagtagtttaagtatatattttataataaatcatctcaatatgaagaccgtttcaatcatatgtcttgtacaaacatctattacaaagtcctaaaaccctccatactctcttcaagcatatagtgtgaaaaccacatcaagttctgcttcataatagccacatgaactcctggttggtcagaactatatgccattcctttaaatataattaattctgtatcaacttccatatccattaatccttgatatagatcatatgcatttgtaatcggaattcttgcatccttttccccatgttgaattaaggtaggcgtacaagctgatttaatatacgtcataggtgatgtcttcgtatatatatctggatcattccatggagtatttcctaaatacattctaataaagtaaggtatatctgtatttacataatgggtactccagttagttattccaccgccaactgaaatagctttaaacctgctactaaatgtagaacaaaaagctgataaatatccaccgttgctccatcccataactcctactctatctttatctactatcccttgatcaactagtttatcaactcctgatataacatcgtcgtagtcagcaatcccctgttttctatagttagcttttaaaaattcattaccataacctgaacttcctctgtaatttggctctaaaacgataaagcctttttcaacaaactgttcaatcggatatttctcattgaagcagtctgaaaatatcggaaaagatgcccaagccggaccaccgtgaattactactaataaaggatattttttattagtgtcaaactctactggcgttgataaaacaccttctatttcaagaccatcactacttttccatgagatgatttccctgttacttttaagtttccctttgaaaaagctattttcatccgttatttttttatcgtctaaatagatttcaaaggtttcatttgttatagccttattataggttatatgatttccatcctttgttatagaggcatccattataaagccatctatcttgtcgcttaatgcttccacagtgccatcttcagctagtaatccaatacgataattcgttttatcctgccatctaattaaaattcctttagctgtccactgtaatggcataactgtactatcaaagtttgttagaggctgaattacctctccagtattcatatcatatatctctaacgtactatcttgtatatggtttctatagtaatccttctctcttatgcttgctgtgtaacatattttactgccgtcaggagaaaagcaaacactccctcccaacaacttatccacattcagcttttgtagctctccagctttaatatggagtatgtatagatctccatttatataatctgccatatttgagcttggtgtcgttataaatacaacctttttaccatcatttgaaatatcaaattcatggatatgaaagtccttaccatccgttaattgataaacaactctgttctcgtgttcatctgtatcactttgtatcaccttttctatttcaatgtaatataaacaatcattctggtgttccttacctatatgttgaaaatctccatatagctccttacgtttctttatctcttcacattcttttgactgcgtaacataataaagccccttgccagtaggaccccatttgaatgtactgactccttctttctcatcagtaatttgaacctctctataatcatctagtgacttaacaaatatctgattttccccgtcaccaactggactaagatatgcgatacacctagcatctggagaccataatgggtgtgtactatctatatcaccatttgataatgggtaactctgcttcttatctttttcatatatccatacatgattcctatatgtattgtctttccaatcagccgtcttcttaacaaatgctacgtttttaccatcatcacttatgtttgtacttgatacggttggtaatgaaataatctcttctatacttaaatatgtttttgctttcactttcatataataagcccccttgtaatgtccatgaatctaccgtctcttcttgtcgtaataaaggaaattgttcacggatacttaaaatagtaacggaaaattcagataaataaaagtgaatccgataaagtaaaactttaatctatagggctctttccgcttatcaattttagatgttctttttcgacacaaaaatacccctttagataaaatatctaaaggggtgcaaatttgtaaatttattttaaagctataactatatttattaacctaccaatctcctactcaacagtaacagacttagctaagttacgtggcttatcaacgtcacactcgcggtgaagtgctgcgtagtatgagataagttgtaatggaataactgctactagcggtgctagcgcttcgtgtacagctggtaatacgaagctgtcaccttccatttctaagcctttcattgagatgatacatgggttagccccgcgtgctactacttctttcacgttaccacgaattccaaggtttacgtgctcttgtgtagcaagtgcgataactggtgtaccattttcaattaaagcgattgtaccgtgttttaactctcctccagcgaatccttctgcttggatgtaagagatttcttttagttttaacgcaccttctaatcctacgtagaagtctacgctacggccgatgaagaaacagttacgcgttgttgctaaaaattgttttgctaatgcgtccatttcttctttttgatcacaaagttctatcattgcatttgctacaagtcctagttcgtgtgttaaatcgaaatcaagaacttcaccttttgctttagcaatatcagccgctaaaattgaaagtactgcaagctgtgctgtgtaagctttcgttgatgcaactgcaatttctggtccagcgtataacggaagtgtataatcagcttcacgagaaagcgtagaaccaggcacgtttgtaattgttaatgctttatgccccatttcatttgtttgtacaagtactgcacggctatcagctgtttcaccactttgtgaaatgtaaatgaagaatggtctttctgttaataatggcatgttgtaagagaattcacttgccacgtgtacttcaactggcatttttgcaaacttctcgataaattgttttccaacaagacctgcatgataactcgttccacatgcaatgatgtaaatgcgatcgctatctaaaatcgcattgcggatgtcttgatttaattcaatttcgccattttcatcttgatacttttgaattatattacggattacaagtggttgctcatcgatttctttaagcatgaaatgaggatatgttcccttttcaatatcacttgcgtctaattccgctgtaaacggtgcacgttcaatcgtttcaccttgtaagtttttaattgtaatactttctttcgttacgattacgatttctttatccattaactcaatgaattgatctgtaacttgtaacatcgccatagcgtcgcttgccacaacattaaagttgtcaccaacacctactaatagcgggcttttgtttttagcaacataaatcatgtttggattttcagcatcaagtaatccgattgcataagagccatgtaaaagagatagcgtattacggaacgcttcttctacacttaatcctgtgctcacttgttgttccataagctgtacgataacctctgtatctgtttcacttacgaacgttacatcttgtaaatattcctttttcactaattcatagttttcaattacaccgttatgaactaatgtaaagcgttttgatgtactttgatgcggatgcgcgtttactttacttggaacaccgtgtgtagcccagcgtgtgtgtccgatacctacgcttgctgctacgttctcatctacgatttcacgaagttttgcgatacggcctttttctttgtatacaacaacaccgttctctgcttgtactgcaatacctgctgaatcatatccacgatattctagcttttctaaaccttttaataaaatttcctttgcatcttgctctccaataaatcctacgattccacacatgtttagtcgccgttacaaatgcttacactgctctgcgaacatgtaacgacatagtccgataccatttttatttatactaaaaaacggattacatattgctagccctgtaagcttgtaacggctttcaccttcctctcgattgggtttaagtccgtatatacttatacagctagttttcatccgttcctcttctctcatcacactttcacctttgtccactaagtcaccttaatgatttaagtaaaagcttgcggttgtgatgaacaaccgggagtcatccgccgaaatctcgataaaccccacctcgtcaactacactatttgtagttctggcgcttttatgatttacaatatttcctttgagaaaaagaacaagaccatcttataacaaacatggataaaccgtcaatgaaatttttttcatcgtctataaaacatatgaaaaaggagcactttttgtgctcctttttcatataaattcagctaattattcagcgccaacttcggctttcacaacttctacaatgcgatgtacatatgcatcacaaacttcttgtgttggtgcttctgccattacacgaataagtggctctgttccagatgggcgaacaagaatacggccatcaccgttcatttcttcctctacaacacgaataatttctttaattttttcattttctaatgctaattttttatctgttacacgaacgtttactagcaattgtgggaatttcgtcatttcccctgcaagttcagataatggctttttcgtcattttcatgatgtttacaagttgaagtgcacttaacattccatcaccagttgtaatgtaatcaagtaagataatatggcctgattgttctccacctaggttgtaacctccgcgcttcatttcttccattacgtagcggtcaccaactgctgttttatcacttgtaatattatttgcttcaagtgctttgtagaaacctaagttactcataacagttgaaacaactgtattatgttttaattgaccagtttctttcatgtacttcgcacaaatgaacataatttgatcaccgtcaacgatgtttcctttttcgtctacagcaattaaacggtcgccatcgccatcaaaagcaagtccgatatccgcacctttttcttttaccaattcagctaagccttctggatgtgtagatcctacaccctcattaatattcataccatttggagaagttcccatcgttgaaatatcagcttctaggtctgcaaataagtatggagcaagagaagaagttgcaccatgtgcacaatctaaagcgatatgtaggccagagaaatcttcttcaacagtttgtttaatgtactgtaaatatttttgtccaccttcaaagtaatcactcacttgtccaagattagtacctgtcggacgtggtagttcatcaacttctttgtctaataaagcttcaatctcagcttcttgctcatctgttaatttaaagccgtctgaaccaaagaatttaataccgttatcttgtactggattatgagatgcagaaatcataacacccgcttgtgcgtctagtgcttttgttaaataagcaacgcccggtgtagaaataacgccaaggcgcattacttctgctccagttgataatagccctgctactaaagctccttctaacatatggccagatacacgtgtatcacgaccaataattacttttggacgatctgtatcttttgttaatacataaccaccaaaacgtccaattttgaaagctaattcaggtgttaactccttatttgcaactccgcgtactccatctgtaccaaaatatttacccattatgattcgctcctttttcttgctctttttgattgtgattatctactgttggttcttgactcgtttctttatctttatcttgattttgattttggttttgattcttttcctgttctttttctgaatcaggttcaggattttttggtttctcattttgattttcttgatcggtgtttgaatccggttgttgaccgttaccctgtacttctttatctggtttttctttcttcacaatagtaactttagcacttttttgttttggctctattgaaatattaccaggaccactcacttgaattgaaatatctttcgttcctggagatacattttgcagattaattaccgctgttatttgagcagctgttattttatctactatacttgcttctcctgaaatatcaacacttatctttccatcttgcggcgaaagtagctgagcagtaacatctttagaaagtccatttttctggattgggataccatcaatcgtttttgttttcgtttgttttgttttttgcactcccaccgaaaccttcacttgattcggtttggcacttgttacacccttgggtaataaaacagaggcatcgaatgttgtagactctgtcaattgactaagatctacttcgaccccctctagcgattgtatattatccaaaatatcttttggaccagctatcgttacttctctcggttcaacactgatatttgtaaccgccaatccttctgctaaactccccttcttcgtatacgttacaggaacagttttttcagtattattggctgtattttgcgttgccacattcaacgttacactaatcttagatggacttgttcttacatttaaacgttttccttctttattgtataatgtaacttcgggcgtttttgtaacagttttattaacaccttttaaatcaacatacgctttggcagatgaaatgctttcaatttcttctttcgtcccaactacctcaacagtatccggtttaaggcttgatttttctagagtagcccccgctggcatctgatcctcatttgataatttcagatctacatgaacatattttctcgccttttcatgaagagtaactttaattgttgatggctgaactgttcctttcacatcatctggaagcccgttcgtttttaaagaaatctcataagttccttttggactatctcgcaaatcaactggtatgtcaaattgtttttttgcttttgctgtagcaactgatgcttttgggccttctaattttactttaacgccctctgccggaataccacttacaatatatttctcctcatcatacttaagattaatagcataattagttaatgtttctttcgtatcatttgcaaaaggtaatataactgatgtcgtatttttttcagttaacgtcgctgacataaaaagcatacacgccaatagtaatgagatcccttttaaaaaccaatgattctccattaacttatccatgacgctttctcctccaattccataaagacgaagaagtcgttttttcgtttccactaaattcagctaataacatatccttcagctgttctgtcttcaaatcacgatgcaacttaccatttttcgttaaagaaatttgaccagtttcttcagacacaactactgtaatactatcagtaacttcactaactcccattgcagcacgatgtctagttcctaattctttagaaataaacggactttctgataatggaagatagcatgctgctgctttaattgtacttccttgcataattaccgctccatcatgaagaggtgtatttggaataaaaatattaataagtaattccgatgatacgtttgcattcagcggaatacccgtttccacataatcacccataccggtctcttttgacaaagtaattaatgcaccaattctacgtttccccatatattcggttgcttttgctatcgctgttgcaaccatttcaggttcatcatcctcatgcgttccaacacgcgaaaataaacttccgcgccctagctgctcaagtgctcttcgcaattctggctgaaagataataataacggctaaaaatccccacgttaatacttgttcagttagccaagatagcgtacgcaattcaaggaaaatactgatcatcttaacgacgataataactgtaatcccttttaaaagttgaacagcttttgtccctcggattataagaattagcttatatataataaaccatacaatggcaatatctaatgccgtactaagatatttcaaaatggtcgtatcttcaaaaggcatgctatcccttcctcctacttacgagcaattctatccatatattgaaatattgttttatgctctatctgtatgtatttccaacaactagttaattataccatacatgaaacaaacgacaattacaaacaaccccctttagctcaaattggtaagatgtcaaacatttttattgtacagtataatataaatcattattatacgcctattttcaaataaaaaaagcaacttctcagttgcttttcttacatttattttagtttttcaccgaataaagaacccattaaagcaactgctgttgttgccgttctatttctctcatctaaaatcgtatttacctcaacaaattcagcagatgtgataatatcagcttctgctaacatttccatcgccaaatgactttcacgataagatagaccgccaattacaggcgttccaacacctggtgcatcatgaggatcaagaccgtctaaatctaatgataagtgtacaccatcagtatgagataaatatgcgattgtttcttccataacagccgtcatccccatacgatcaatttcatgcattgagaacactttaataccttcattgcgaatgaaatctttttctccttcatccaatgcacgcgcaccgataattacgacattctcttttttcacctttggatatgctccgtataaatctacaagtgaagaatgtccataacctaaacttgctgcaagtgacataccatgaatatttccagatggtgaagtttcctctgtatttaaatcaccgtgtgcatcataccaaataacgcctaagtttttataatgttttgctacaccagctaatgtaccgatagcaatactatggtcaccacctaatacaagtggaaaacgaccttcttctataatatgatccaccttacttgctaattcattacatacagttgcaacttgtgtaaggtttcttaattttgtattttcatctatctctttttctctctctatacatatatctcccatatctttaacgtcatatccaatttcttcaattctttcaattacccctgcataacggatcgcgctcggtcccatatcaactccacgacgcatctgtcctaaatccattggaactccaataactgagatttcctttttcatagatagtatcccccttttatgccttcactaaatattttaaatcttttatatagtctgactcaactcgacatttttctgtatggatatacaatttattcacttatattcatactgaaaaccaaatttcaagactattctatgtataaagttaacttaatgaaacaatcgcaatcactattattaaataataataataaaacactcctacatttagaagtgtttttctgatgctattttccatactattgcaatattttttgttgtcatttcaatattttcttctgctactttatatgcttcttctagtgtcatcggtctcgttgtaatactaaataccgcatctattcctttctcgtacacagctgaataatcagatgatacagaccctccaatagcaattacaggcacagaaaaacgttttgcacgccccgcaacacccacaggagcctttccatatgcagtttgtttatctattctaccttcaccagttataatgagatttgcatcttctatatgtttatcgaaatttgtataatctaatacaatttcaatgcccctccgcaagtctccctttaacactgaaataacagccgctcccattcctcccgctgcccctgcaccaggtatttcagatacatcaaaagatacatatcgtttaagcatattcgcataatgttgtaaattctcatctagctctttcatcatctctacatttgcacccttttgtctcccaaatatgaaagatgctccctgcattccgactaatggattatccacatcacatgccgcttctatctttaccccctttaagcgggggtccatttgtgaaaaatcaatagcaacaatcgaatgtaatgtgcctccagatggatctattacttcacccttgtcatttataaatcttactcctaaagctgctaacatacctgccccaccatcatttgtagcacttccgccaagtcctaaaattatgtactccactccttgatctagcgcatgtaatataagttctcctgttccttttgtcgttgtaataagtgggttgcgcttttcaactggaacgtgctgtaatcctgatgctgctgccatttctataaacgctgtctttttatctttagaaatgccataaaaagcttgtataccttctctaagcggtcctgtcacactaattgatataattctcccccctgtagcatcaacaagtgattcaaccgtcccttctcctccatctccaattggtattttcacatactctgcattaggaaaaattgctctaaaacctctttcaatagctccacatacttctatagcttttaggctttctttatatgaatcagatgcaataacaactttcacaattatctccccatcccttatttttacgttttcttcattttaaacgacaagtataaaagttgtctttttaaacacaaaaaaagcttacatcatatgatgtaagcttttttatttagatggagcctagcgggatcgaaccgctgacctcctgcgtgcaaggcaggcgctctcccagctgagctaaggccccttattaattaagcggaagacgggattcgaacccgcgaccccaaccttggcaaggttgtattctaccactgaactacttccgcaaaaatggctgggctagctggattcgaaccagcgcatgacggagtcaaagtccgttgccttaccgcttggctatagcccattaatatttactagtatggttatcttttcaaaaaaataaaccctctcaggttattttaaagaaaatggtggaggggggcagattcgaactgccgaacccgaaggagcggatttacagaataaagtattgttgtccttattcccccttttcggggggatgggcaaaaacacccttgtttaagataagaagaaaactgttttgcaacatccatgtgatttcctccgcgtctataaattgtgttgcgtctaaaagtatttatttatcgataaattgtgttgcgttaaacccctagatttatatttattataacacctaatacaacacaattaatattgtgttgtattattttttgtataaaaaaagacactgtatgtgtcttggaataatgatatattttctgattttttaactctgattttcttagcgtggtttttttccgaaatgctggcggtaccccagaaaacagttaagaagcgaagggtagctaaaataatagtgcaaaagagaactttggtttcattactgaagttctcttttttgaaaatatgcattatttcatatttgacaagtacggtttatcgacaatttacgacaaaatctctagtgttattatgctaagatacgacatgctaacattacgttaaaagaatattaaatggatcgagattattttttagttttgtttactttgatacttccagactgaaaggttcgattttaaaataataaattaaaaattagaaattacatagttctattcaaggagaaatgtttatgcatgataaaataaataaacaagaagaaactaaaaaagcgttaatagaatttctaagaatacttattgatgaaattgattttcaaagaagaactcatggtaagttagcggaacaaattgggattagtagtggcttgttatcaaggcgtttatcggggaaaaatcaattcaattttttgagtttaattaagttgttaaatattttatatgaaaatgatgcacttcaaaaacagaaattaatacacaagttttgtttacttaccacaagtaaacaaaacttacgtattgcgatggagtatgcgcatgctaaaggagatttgaatctgttaaaactactcgttgatcaggaaaaaacatcatcccttgcaacaaatagagaatgggcctatgtatatgatttggtatggacaaggggtcaagggactcttctaggtaaagagttacttgaaaagttagagagtagtaaaaagggtagagtaataaagacaactgaaatgaatgctttatatgatgttttgacatgttatattatgtatgatatagaaaaagtaacctcttttttcgaatatattgagatatcgaagccgaaattcactgaaataaaagatgaatttactagaaatatgtataaaattaggatgaaggaggttcatgctgctgcacatttgttggggggagatataaaaacttgtcgcaaattatgtaatgagattatagatacggaagatttgtatgatgttttttcgatacaaaaagcttcagcatattcgtatttagctgagtcatatacctttgattgctttgaaactgcatcaagttatgtgaaaatggctttgcaatatttagatacattgtattttaaaagagcggaagtaagaaaaaaacaaatattaaatacatatgggtttatgcagatggtacagtatttaactagtgagaaaccacttttcaacctaaatgatattaaggtgtttcatcctgctgaacaagctttattagaaacgctaaaaggaaatagagatacggcgataaagattataaaaaatatgaaaaaagagaatggatatctattaccaatagagtattgctatttaggattggcgatgaatgatatagaatacattcataaatctattgagttatttaggtataaaggaggagggttttatagtgaattaccgatttttatattgaaatatttttcggaaaatggtatcatgtataggagtgtagaaaatgaaaaaagtattatgtgtagttaaagttttagttatagttgctgttgtattatgtacagcttacgaaaaaaaagaatcatatcagatttcccaaaaacatgaaaagcctttacttgctaaaatggttaacccaggtggcggagttgggtaattaattatatttatgaatgcgattgtctcaaatgaggcaatcgcattcgctgtttttagggatgtttactaaatttcaaattcgtaatttagtaaaggattgtgatttgattcacaaactatgaaacgataactatattttaattactaattatcaagattttatattaacaaagctaaaaagaagtgttaaaatcagaacaaacgttctacgcatttccacaatttgtaatttagaaaagtcaaaaaaaatcccagttatctaatccgttgataacactgggttttccgaagacttttgatatgtagtttggttagatgtagcagtttttgagaaattatggattgacgataaaacacaatcgttgtaatcttaattttgaaagatgtttattagcatctaaattgtgaactactaacaattacatagttacatgggctgaaaataaaaagagctaccaactcttgatattttcgaccttttaaaacaacgacctgttttagaaaggctgcccacttaatgaagcataacgagatgcaacatcaataatattatactgtttcgtgtatttatacaagatatgtaaatgtatacgtacacgtgagtttaagcaatattattgatgttgtgcggttatccttcttaaaagtggttcttcggattgaagaaaaaggcgtagactaaaacattagtttacgccttttttgtattctgtaagaaacccattggctatatgaaaattttataatgctcacctttatatttgtaattgtttatgtggatagggttgagttaagaaacttgttaagtatgatgaatctagaccctgagaaagtctagatacaaactgaaattttaaagattggagagaagaaccatgagagaaaaagagtttagcaaaggtacacacaggcttaaagtaacaaaagagatggatgttggcactctattaaacagagcgcacaaagttagtacatttgatggcaagaatttagtcgttctcgacaatggcaatctgtacgatcaaacagttagaagagaagttccagtaacaaatatgtttaggtatatcaaatgcgtaagaaatagcgatggtatcatcattgccaagaagaataaaccatgtgctacattgatgcaggttatttttgagagaaaaacaaagaaaaaagtgaagtagtaatacatttgatcgatttaattgtgcaagaaatacagcacacttggggttcatagcttaaggacataattcttgtgtatgttccccatacgttctttgaaaacttgatatagttgctgggggaagggcaaatcatcgcatgccaatctatttcgtgaatctaggagatgcaagacacgaataaacccttagggacaatagtccgcttgaaaatagcaatcgatgttggtctatctgtagcaagcctacagactacttaaagggctgtacacatgacgccatgacggagaaattccaaagcgatatatttgtacaagcattcctttaacgagagggcgtaacgagactaaacgcccctgttacaaatggagatactcctttttcgcatttgtatccgaccgaatatagaccgtttattttttaaaaatcaagaatacaaaatattttttgtagaattaaacagatcaaataggagtaaaaaattatgagtatggaatgccgagaaaggtatattaggcaaatagcaaatattcttacaagcaaaacaaagcatgcaacaggctgcctaattgaaggcaaagatgatgtgtgtttagagtttcaaatagagctaataaacgcattacaagataatgatacacttgcttatcatgtagatttcaccgattatacaagcgaaactgaatgtcttgcagcgttgaaaaaggcacgtaaacaacttagttcaaataagcaagatggaaagacattatttctttctctagcttcctttgaacgtgtagagaagaaaacaatggatgcagtaaaaatattaattggtagccgatcactaggcatacatttactagttagtgcaaataagagattcgtccacttagtaggattaacagaatacttggttacaatgaacaaatcagatgtagtgttttctcagctgtaccgctatagcacacaaaaggtactggcttccctaaaaaatgattcatggggggaagctgatgaatcataaaatcgagaaaatattgagaacaaagagcattcatgtagatttgtttagattggatgaaagatatgatctcggacaaagtatagatgtttgctgtaataaaatgaatgtaattcatacctttaaagtgtttaacatcactttgctaagaggtaatcattggctcgttcatttgcagtaaggttgtagtatagcgctataaaagtagtggggtctcaaatgttcatatgttaatatattaatgtaatgaatataaatggaatggagtgtagagaccatgtttaaaaggtttaagtttttatcagctgtatcggctttatttatatctataacagtactgcttgcagggtgtggaggttcttcagtcccctataaaaagggtgatacttataaaaatagtaaagacaatttcgttactattacagctgacaacgaatggagagttaaagggtatcaaaatcgtgaagcaatttataaggtggagccaacggaatataaagttgattcgtattcagttgtatcaatttctgtaaaagaaaaaataaatggtagagatcctttgcaggttgtaaatgattatgaatattacatacttgcaactacagaaaaaggctttaattctgtgtatattggttcttcgcatccaaatgataccaaatggaaagaaatcaagaaagaattagaaagctctagtgataaagaggatcttttgaaaaaagagtatgagaataataagaagactctaaagaaattcgaaaagacaaattaggacatacaaataactgtaagagcagaatcatattaatggttctgctcttttttattgtcaaaattaagtagggcaatgggaggtaaggggatatgatcagccgagatcaactgttatttccagctatgataacttttatggttttaatgattttgttatttgatgcatcgctatcattcataatgattcttacagaaaagacaatgtagtaatggaaaacgtcaaatcagctgtaaaagatgcttgtttgtggttgttagttttggttttaacaactttaacctggctgggaattgaaaaaatggttattaccatgcttttagactaaatatattttttgtgtgcaaactctttttgcacattttaaatgggggaaagtcatgaatattgttgcaacatttcattttgtaagtggtttaagaagatcgactattatcaaatcggagaatatagagaaagcgagtatatttattaataataagttttttcagggtgttggacatgcaatatttgaagtagagatgcaagaaagtagagatggatttgaaggtattgatggtaaagtagaaaagtttgaagtgtttcgtgatcaagtaatgtttattgattatcaagtgaaataattttatgtaaagagagcagatccctgggggctgctctttttatgttttgagattagcaataaacaaagcatattgagtatcttcaatatgttttgtttgtaattaatcgataaattacaagttgattagaaagtggaggtgttagcatggtaaggcttggtcaagtcgaaaaagctgttgaaatcgtgaaggaagaagtacaggagcaagagaatgtaaacacagctgttgtaggtggaataggaacaggaaaagatttttctgttataatacctaacattctgctagaggaagaaaagaatttagtagtaatagatccaatagatcaaatatcaaatgtgtatacatttaaagaaaaacaaggatatcatattttaacgtataatttagaaaaagaagatattttgcggcagttaaataatgatttaatggcaaaaaaagaagaaaaacttttaattcatgtaatcttccctaatgaattttttggaaatcaagaaatgaatagtcaacgtgttatggaattcttaatggaaataaaagaaatgcaagatataaagtggggacaagaaaaatcattacatcttttccttatggaatatgaagaatatgcatctcctaagtttcatgctatttttcaaacatggtgtggatacagaattagcaccacgttgagcgttcagcatgtactaagattggatgatgttattctagataattgtcattatgtactttataaaagaatacttgatccacaaacagctgaatggattgcagagaagctgaaatatcatcatgtagaatttcactcgaaatttttagtaacaaacttattgtttttaccattgacagcgggtatgttaatggatttacctcttaatttaggaatcttacagaaaaactatagagataatccttatggaaatgattcatggacaaaacttgtagaaacttacaatgctgaggatattttgggcagagcgttatatcctaaagtgtaaaaaaatctaaagataaagatgataaaagagcagctccttaaaggtctgctctttttttatagtcagttgtgtataagagtggaggtaacagatatatttcttcctcctttccccaggtgatatagcgttgttacctctactcttatgtacatctaaaatattttaaacaagattggtactgaaaaagggtagatcctaaagggactgctctttttgttaaacagttgtatataaaagtagagggaggtgtttgtattggtaaaaaaacccctaataacggaatacgagttagctaatttgaagcataattcagagaaagaaaaacaagtggtgttagaaatttatagaatagcttttgaaaattttttagaaaaagagtttactagtaaatttcttactaaaaaaattagagagcaaatgaataaaggatttgatcatttaggaataagcctaatgaattgtaacattatggagaaccgtactagtttcaattttaaggatatgattagaaaaacattttcgaatttcttttgtaggtttttctataatagtgtcgttattaaatggaagtattggaaatatcgcaaagacgtaaaaagaattgtaggtatttgttgggaagatgaaataattgaacttagcatggaagaaattgcagaagaagtaatttataagagtaatgtttacttgaaaataattgatgatctagagaaatcaggattaagagtaagtgtgaaagttgatggtgaaatctttattttacttttaacctgggggaaatggatggagacggacaatgaagaaggttagaaaatgtaaaaagtgccagggcaaaggtttcatgttcggtaaaaattacataataaaagagaattcatttggttatgaaacgcaggagtttggtattaaagtaacctgtactaattgttatgggaaaggtattaaataattgtatgattctaaaaaaatataattggtattcagaaaatagatcctatactaaccgtagcaaacgaggggggaaatcatgaacaaggaagtcacaataaaaattaatgaaaaaggttgggaaatgttcgttcaagttggagagaacttatatgaagagaaaggtatcatgcagaagtttaatgatgctttaaacgtaaaaggcgtgttagacgaagatgctgcatggatgtcagatcctttgtttcaagtacttagtgaaaacttcttttgctatcaggtagcaaatgccttaataaaaagctagtaagagggtgaatgttttgaatgcagcagaaaaagaacgtaggataggtcaactggaagatgaaattggtggtatatggatatctttatttataggatgtattatgtttttggcgttacagtggggaatagaaccaatgatgaaaaatgtactagatagagagggttttccaactactcttgttgatattatttttaattatattattggtgctgctttctggatagggtatatcattggaattataactattttgaagaaaaagaaagaaattaggagatataaaaaagaaaaaaattctccttcaaaaattaatatacaaaaagatgatataaatcagaatcctgtttatgtaattgatcatagcaaggataaaaaaaatcgatatgaaaaaggggatagagatatgatgaagcgagtatttaaccaaaataacaatgtttctactaatttgggtaaacagaacactaataaaacgagaggtaaaggaagtccaatacgttcatacaatgggtctactcattcttctaatagtacggaaagtaatgacattaataatattgttttaggtgttgcattaggaagttcaatttattcttcaggggatgataataattgttcccaatcggattcttcatcgattggtgatagcggcccaagttgtgattaatggtttctgttgaggattaataaaataagagaatgtaaaagaaagagcagatcttaattggctgctcttttttattggtaaagattagctataaacaaagcatattaggtagtaatcagtatgttttgtttgtaattaatctcaaaaggaaaggcaatttaagaaattagggaagtggggatggagatatgaataagaaaaaagcattaattagtttagcgtacgctatggcgctatatagcttagtaggttgttcgaattctactaatacaggtactatggcagcggagaatgaaaaggctgctacaagtgtaaataaagaagttacaaataccgaagaaaattatgaattaggagaaattaagattacaaataaagaacgaaataaggaatcaagaattgaaattctagaagctcatattgttgatgatggtgtaaggggaactgatcctcgaaatacagccttacaagaagtaatcattttacatgataaggtacaagattgtaattatctttatacatatagctccagtagtacgggatcaggttcagcgacaatgaaaaagctagagtgtggtaagaaagagtaaggtgattctatgaagaagctaataaaaatgatatttagtatagagtgtctcatatttgcactgatgatatggtttttcttatggtcttatacatggatgactaatgaagcaaaagaggataaggtaaaatccctacaaacttatgaaaatattaaaatagcagaagagttaattgcaaaggaactaaataaggatattaaaaacattaagttatttgataatagacatggcaaagaactaaataatcaaaaatgggtagaagaggacatgaattgtaatgtcaaaacggatgatggaaagtataaagtgtattttaatgtcaaaaaaataattgataaaaaaacgaatactgaaatgtatgcccctaaaaatattgaaaagttagtaagggagtaacttaaaatggtcaatattattatcatttcaggaattgtttttctaatattagtattgctagttctttatatccattggctaataaattaaagggagagaagaagtatgaaaataaaagaaacagattgtaaatatacgtattgggaagaatcaataaaaatgttttataaaaagcaagaatgggaacgaaaaagacagcaagaaaatcaaggaaaacgagaaggtaagtagcatggattcgcaaacaaagaagaataccagatctaaaatagggttaattaaagtaataagcataattatctttattgttggagggctagtttatataggaattagttgggaggagtatcttgataagagcaataaggcgcatgctataaagatagaacaaacccatgaaaatataaaaatagcagaagggatgattgaaaaagaattaaatattagtagcaaatatttcaaaatgctcggtacacgcactcttttatttttatcagaagatgcagaactaaacaccaatacggatgcatattgggtaagtaaagatataacatgtaaagtacaagttaatggtgagaattatagcgttacttttgaaactcaaaaagtagatagtgaaaatgaagaattagaaatgtatgaaccagtaaaaattaacaagatcataaaggagcagaaatagtatgaaaaaattcttactaggatttgttcttatagggcttgttggttgtgtagatgttgataagccggtaacaggggattctgaagctgtacaagagatttcaagtgagaaagaaggtattaaggtttttgtagataaagagacagggtgtgagtatttatatagaaataaatttgttggaaatgttacatatggtggaatgacaattagactagatgaacagggtaaaccgaaagggtgtaaaaaaatctctgagcaaaattacaactaaatatggagggttacaatgtcagtttatattgaaggaattcatgaggattatacttatggattccttttttactctaaaaataaaagaattgttttggatgatggagttcaagagtacccaatagatgaagcagaagtactcctggaaaaagaattcgtgtttatagatgagttaaggaagcttgatccattaaaagtaccaggattaagagcaaggattaaattacaagtgaattaaatagaaatcaaaagtctatcaaagcctattggtagactttttagttttatttaaacagtaatgaagttggaagggaggagagaatataatgccagtctttcatgtttggtataaaaaaggaataacagatgaagataaattacatcaaattgtcaggtcgaaaaatgaaaataaggcaatattaaaaagtgatgcttataaggagggaaggtgtatagatgatgtgggaatagaaaaatatgagtgccttaaagcggaattcggtatgtctttaagggaggagttattcgagcttggatgggcatttcgatgtgcgaaatgttatcaggtagtaggtgatggcataatattaaccaaagtattccgtggaatattttgtgaatgttgcaaggaacagaatgccaaagaaattgatgagtattcacattttagaaaagttattgatgcaaggctaacttatatatttcgtattagttgtttgctcatcataattgggacgtgcatggctggatatatttatgatgggatttcattaccaggatttgttatgagttatcttttatggtgtacaaactggctgttttattatatttctgttaatcaatcaacgtttgagcctgagagtgacctgaaaaaagattcgattgcaataggcggttttacgtttatccctattgtgataaatttgcttgttactggtgaaattcctaattggttataccttgattggtttaatagccagtggttaaatttaagttcgtttttaatattagctgtaattttaatgataatagcgtatattatcatatttatattctgtgtattagtgcatgaagcgataccttctttaatacgatggttaaaacgacaaagaaagagctattggattgatttaaattatggtgattgggttatttataaaggatgtacttgtcaggtaataagttctaatactttatttcatagtaatagatattctgtaactcttgatgaatggagttaccttagtattgaaagtatcactcgcttagatggttattttatagttgaaaataaaaaaaacataactgtatttatggatgaggatgagattgaaagagtagcaacagaggaagaaattcaacaagaaataaatagaagaagtaaattcaagatatatgagtttaaggaaagatatgggttagaattcacatgtgagcaatatggacctgaactcatagacaatcgattttattcagagggtatcatgtttaataataccaaagttaagagcaaggattaaattacaagtgaattaaatggaaatcaaaagtctatcaaaaatatatggtaggctttttagttttatttaataaggagtggttaagagtgctgaacaaagtaactattgagtttggagaaggaacaaaagcctggaaggatatgcaggatgtaatgactattttaaaagaaaaaggatattctgttgaaccttatgaggaaattggcactgtaaaactaactaaggggattgttgatgagatgtctgaagaagatagaggagcagagtcattagcagcggtataccattctaagtaaattgtcatagcgctatgattcgactgaaaggaggtttatatggaagaaagagcaagaagtccaaccaatccccttctctcatgtgaggatagatcctcatggttgtaaagagaggaggaatacgattgtggtttagaaggtcatttagtttactatttgttgttatgcttctgtttggaagcttggccgactttgtatcaattggacatgcagaaagtacatcggaccagaaacaggctcaagagaaaaaaacggacgatgtgactgtgctgcaagaaaaatctgatctgaagagtacgggaactaatccaagcgaggtagttgtagcaaatggtaaaaaaggtagtgagttgtttgattttgaagcctttattaagccttcagacattgtagatggaacagcaccttttgattcgaatgatgaagcaggtaatgattctagccctaataatggcattgtaaggacgtttgatacagtaacgtacccattgaaagtgacgattaatcctaagaagaatgaaacgttaaaaaatattaagatgaaaatcactggtacattagaaaatggaattacaaacaagcgtgttaatgcaaaatttgctgttggtggtaaagaggatttggaaaagggtattgtttcttttgatatggaatacacgttaaaggaaacaggtaactccttaatgattcctgttacggtggaagtacaaggggcggagcatggattgaaattaaagcctaacattaaaatccaggttataagtgtagatgggaaagatattgcaaatgaaaatgtatcgcaatcatttgatggtattagtcccgttactacttcaggaaaggttaatgtaaaggctcgctttactgcttcttatggtggaatgcctagattggattataaggtttatgatcccaatgcaaaagaggatgatcgtacaatcatatatccagttgctttagatttatttgtaaataatttaccaaaccgaactgatttacgaggagctacattccctgctggaaagattaattatcactttaatttttcaggaaaagtcgattgggattataaatcgttaggtgcagaaacattgaattttgagggtcgggataaaccgataaagatctttaactatcaggctattgataaaatagtagataaagtgccacaagaaggtacggaaagttttgaaattggtatgaagggctataaagatcctcgtactgagacagcaaacagtcctaaatcatatattccaaaagatatatggaatgctagtgatattgataaatacacgattgacagtgtatgggatagtggaacagtacgtttgaataaaccagaaattacaaaggatcgtgtaggttatacgggtagtatagaagactatgtaattggttcaactttcccaacgatgatgtcaaggccaggttattcagtaattcctaccttcggaaagaatgaaaaagcattttcaagcacacgtttcttaatacattcaacaaatgaatattatcctgtactgggtaaaaataataaggataatctaccgaataatgttttttattatttagaatttgttattgattcttatgaggatggcaagggtaatacaattccttataacactgttggaagatacacgcttaccgaaaggaataaccctaaaggtgcatactccatacaaactacattccatacaacagatcataaggagttaggtacaccaaatgttggctatagcgctgtatctaaaggagatccaacagttatagtaggacaaaatgtaaaagtcgttagtcatttgaatgttcgtgctgttacagaaggtggtacaacgatgatttataagtggaatacagattcgttttatctatctaaaaatagtgcggaaacagctaggaagaacatgttaaacgaggggtatcccaacacttctgcgggaagggttacaaatagtgataaacaaaaaatctattttggaatatctaaaaaaggagataattcttttgaaacactaacccaaaacaaagatgaggattatgattggtatagcacatatgatgaagcaaagaaacaaggtgaagtagctgctatcaaaaatgatattaatgcatctatgggggatggtgaggttgtagcatggaatattccattagaggtaaaaacaaagaaaataggtagtgttaatgaaaaaggaacgccaaacataacggttacggattcaatagtgtatccttcagctgatagaaaagtgggttatcgagtacgtggtgaagggaaatataataactttactgagtatgatgaaaagggaaatataacaaaactgcaatctcctgtaggaagtactgtgaattttgaaacgctaggcattatgaatggtgagacgagtagtgatgtgaaaacaaataaaaatacttactacagttcagataatgttagtgtaaccgttgataatttagtaaagttacctgatgcaatggattataattcattagatgaaaaagtagaaatgagagtgaaaataccaaaaggtcttgattatgtggttggttctgctaaatatggtgatcagtatatcgaaccaaaaattgagcaacaaaatgatggaagtaatcatttgatttggcatgacacattgactcgtggtaataaaacgctcaaaaaaatcaactttgagacaagaattaatcctgtactacttccgcaaggaaatcaggtaggtttggaaattacgaatgttcttagtagtgcgatggacacaagggcagaaaaatttaggacaagttctaagaatatttcagttgtgaaaattggtatggttggtgttagtgaaacaattgagaaagtgacagggaaaaagaacagtgactatgtggtcggtgttcaaccgtatacgacaatcaaagatgagtcacatattaaggcacttacatatgttccaagaaataaggatcataatggatctgcttttaatggtgttactttcttgagacaaatagcactagaaaatgctaataataagaacgttgaaatatggcttaataacagctttgttgaatcaaataatccaaacaaaattgatttaaagtcaaatggttggtataggtatacaggagagcaggatctatcaaaagtggtctctattttgctgtatataaatgattcattaagtagcagcgatattgtaaaaatgaatcttgtttacggcacacataaaaatgaatttggagatttttacgtaagtaaaacagtggtaaatacctctgttgattacaaattatctcctgtttctaaccaggtgaaatatacaattgtagcagatgcaaatttaggtcttagaaaaataagaatcgatactgcacctgctgatattggtttgccagtaattgtacgtttagacaaggacatcatttatgaggactctaataagagtaatgttgctgttaacttatatgataagtctgataataagttggtagacagtaaagtatatacaattcaggaattaccggaggaaataaaattcaaggtagatcctaaatttttaaagaaaaataataagagaaactacgaggttagatttgaaaaagtcaataaagaatctatttttatcgtagatgggaaaggaaaagtagatacggatggttatacttcttctgaagaaactgtaaaggcaaatacaaaagcatctactgagttaaaatataaaggcgttataatgacggagcgtgaagtcggaaaagagatggaagtcttttatgaaacacttacaattccgttaaaacagctacctaaacaaaaaactggctatggttttgagttgaaaccattagttagttataacaatgaattagcggtttcttatgatgttaagacaaatgctttagtagataagagattaattgattctcatttgaattatgagaaaaaaggtgatcaatttgttgttcctttagaagaagctgagaaaacaggcagcacggacaaaaagaacactgattatctttttgaattgccacatattaatgtggaacaaaaaacgggtaatttatttacagaccaacaagtaaaagaccatgatccacgtattaagaatgcaataaaggatgggaagcgaaagttatatgttcctatttgggcagatctgggagaatacaacgttttaatagtatcgggaatccctataggcgctaataaagttaactttgaggtaacacaaccattaaatttatatgcatatatgtacgggacaattggctcgaaaaccctggaagatgatgaattactgttagagcctgttgatccaaaaaatcctttctcaaatggcaaaccgcctggttggtcagatgtagatgttgcttggttaaagcaataggaaaggagatgaaaaatgtgtgaatgtcctaacttatcattcggccaagaaacaaattatctttatggcgctatacttcgtaattacaggaatagtaattcgtttaattggatattcgttgcaaggcagcctttctgcttttacacaagctggcatcggaaatttactttcgggaaatttatcattaggtgatatgttccactttgactttagctttgatacgagtcaatttgatggatttagttttaatatgtggattgtttttataaaagacaagattcatagtattataaatgatttattgcctactacattaggagcaattaatatgcttatgatgggcaaatacttaacggtagagcgtgctattaaattaggcattaggttgtattaaaaaataaataattggtagaaaaagagacgtgattttttaattgcgtctcttttttatatacaaaaataaaaattgagaggatgtagtaaatatgttagatcaaaatacggatcgtagttggtggatgattggtgcagtttctgttggtggtgttttgttaggagcaatcctaatcgcttatcctgaaattttacaatcagtaattgatttgtttaagcaaaaactggctgctgcatcaaaataactcttttaaatgtggatgtttaaccattatccaacaaattagggggagtaagctctccctttatttgcttggaaaggagtgaaagaagtgaaagaacatcctttcatcctagtgataatcgttttagggattttcttagtttccataggtggttattactatagagagaattttgctactgattcagtcacacaaggagttacagagacagttcgagcgagtgtaatttcgaatgtagataatagctctcgtgtgcaaagtggagagctgtttattgtaaagagtgattttgaaaaggattttaaaaaacgtattgagtcaaataagcttgtgaaaatcagtaacgatgcaacatatgaatttaagtaccgagataataagaatggctctactaaagcaattcgagccattatccatgacggagatcaaacgtatcaagcaacttataaagtaagtattgcaacatcctagcagaaaggagaattgtatgttagaagcgtttaagaacgtagcagtaaaaaagaaaaaagacagtaaatttaacgattttagctctgtgaattttcaaaaatctttagaaacaataagaaatgatttgaaaaacagtaaagcggaattagttattgatgccatgttaaaagaagaagcaagacaaaaaatcaaagatattattaaagagaaatatgcagctcatttcatggattttccagaagataaattggttgaggtttatgagtatgtggtatctgaaattgttggaacaggtgttatagaaaggttaattaatgaacgtcctgatattactgatatatcatataactcaagtcacttaattgtagaatctagtgattataaagaaattcatagagacactgatcatcaaattacggaacagtatataacacgagtaatacagaaatttgctcatgcagtgggaaaagagtttgctcctaaatcacctatttttgatggtgtttatgactctgtacgtattaatgcggttcatcaccaaaatacaacagggaattctacaatgtcattaaggattgttcgtccgagattggcattacatgaaggaaactttgaaacatttgctcctacgttcatgcttgaattctttagaattctcatggaaacccgaaataacattgtgatttcaggagaaacagggacagggaaaaccgagtttttgaagcttttgttctcatatatccgatttgaacataaggcaattatgattgaagatgttcctgaaacgcatgtaaaaaaactatttcctgataaagatgtgtttagttggttaacgggacatggggttactgttacagatcttatagaagctgcattgcgaaataatccacgctggataatgatttcagaattacgtggtaaagaagcatatgagatgattcaagcggtgttctcaggacatcatattgttacttctttacactctgtagatgcagaaacttctccaaaacgacttgttaatatgtcaaagatgggataccaatttgatgaaaaatctctagaagaggatattttgcgctattttaattttggatgccatattaagcgattggtagtaaaaacaactaaacaagggaatgtacagattaatagagttattcgttatctagcaaaggttgtggaatattcgccagaaggtaacagaatggtatttgaacaaaaatataaaaatggtaaatttacttattcaacaggaaatctatctgatcaattttatgaaaagttagcggaaaatgatatgaattataaacttcctgattttaaggatgaagtagccgttaaaaaggatttaatcattagtagataaaaaatggaaaactccgagaaaggaggtaaaggtttgaaaatctctacttttaatgcaaaaacaagaaaaaagaaatttgtgaatgccgaagaaattaatgcattcaaggtagcatatgggaaacccttaaacaaaaaggattatatgagatatgcagctattccaggtctagttacaggggtattttcttttctcttactttatatatggtggctctcattaattttaggattgatgggggcactatacggattgaaagtgctaatgcctaatattattaaaagggcatatgagcgtgattcatttagggaaagaaataaatttgtcaataatatgacctctctcttatcgaatgaaaatcaaacattattaatctccttaaaacgagcgattaagcgtgcaaatggggagttgagggaagatttaaatatattaatggcaaatattattggggcggatcaaacacaggtgattcatgcttttaaacaactgtccaataaatatcgagaagatattacatttgatcagtatttagaacaacttgaaacatgtgttttagaggggagaacaaacctggagacattgaaagatattaaaactcatcacaatgaaacgaaagaaaaaaaggatgactatgcaagaaagaaagagggccatatgaaagatatgaaaactctttgttttattatagtagtgttcatcttggcaattactgtttcttttggtgttaatacgtatataacagcatttgcaagacaccctattggctgggttacgggtggtatttatatgagtacaatatttttcttctttaaatcctttactgcatactttttcgatgattcgataatggaggtcaaagtatgaagatagtaacagctaaaagtagtaaaaaaaatcgttacaatcgattactggcggaagaagatttatatagcatgttagaagaaatgggaaatacaaaggcaatgattgataaatttcaaaagagacgattgttacaatcatttgttatgtgtattttcggattgctattaggtttgtttctctccagttggtgctacctcatagcaattggtctaccaattttcttgtatcgttctaaatatacacacgttaataaggtatatagtgcttttaaatttgaaagacatttaaatttttctaaattcactagattattaatgccttacttgaaagaggcgggtgaatcagtgagtctatatcaagtttttcgtaaaatacttaatcgtatggaaaagccagtagataaaaattcgttagctaaattaatgtcggaaatgacagacaaaccaaatgatattcagccattcaccgattatgctatgcgttcaagtggtagcgatatgtcaataaactttatgcaacttgtttatgattttcaacaaaattcatcagatacaaacgttattaatgagttaggacaaatagcaagtgctgagttacaaagagcaatcgatgaaattatcgcttttaagttaagacgatttaatttcttccctacgaaaatggtaatgagttctttcatattagtagtagggtttgcagcagcggtattggtatatcacctatcatcaattaatctctcataaataataggggagggtgaaatgaaaatgagtgggtgtaaaatatgttagatggttcaattatgacaattgtaaaatggtttgtagggttaatgttaatcatgctgatggttgcagtaacccttttcggcattcaattgaacgatgtaaattcttataaacaacaggtgaattatcaaatagaacgacatggtggattaacaaaagaatctattcagaatttgaaggaatatagtgatcgtcaatacaaaggagcttttactataaaaagtgagcaactaaataaaaaagttaattacggtgacgttgttgattatcaggtaatagcaaatttgaaaatcatactttttaatttacctgatgtgaagatggaatttcatggatctgcaatctcgcaagtacgctagagagtaggtgtttgagaaatgctagaaaataatacttttcgcttaatagttcttatggggggagtaatcacacttattgcgattataacaatatgtttagatgaaaagcctaatatggaaggtttattccatcattttatttctcaaaaaaacacaaagtattaagtaaaggagtcaattagatatggctaggaaagttggtaaaaatgaaaaaacaccattgcagaatgcagcagcggtgcttttaaagaaacaaggaacgatatatgaggaatggtctcaaaagattgtaagtgacaattgcttatctctacttcaagggggaaatcctgagtggagaaataagatgttagaaggagctgcgatggatctcatcgcagcttctgttgttgaagaggaaaaaaagaacaaaacacaaagtcaatcggatgcacaaccgaaacctaatcatttaactcaaaataatcaatcacataaataagaaagtgggaatttaaaatggatctattcaatatttttgctatcaaattattaacttacaatgatttctttgattctgtaagtaatgcattaacatcttggtctggaaagttacaaggacttggtatagcagttattattttctgtgtatgtattattgctttcatgttcatgttcggcgaagggccaagccgtacagcgaaaaaatggctactttacattgttgttggtggtgttcttttatggggagcaggaactttcgcaagtacagttcaaggcgttacagctggtttctaagaaacacactgaaagagaagcttactaattgtgggcttctcttttgttttaaaaaaattctatatttgaaatgaggttaagagagtgtatattgtagagtttttacaaaaagaacaatcaaaagctttcaaaaagtttttaaggaagaataaagcagggaacggaaaacaactagggttaaaggcagcagaagagttaattcaaagatatattgaacaaaatcaacaatctgatcaagtgctactgttattgcaagatgttgagaatgaaaaggcatatgaatttgaattaccggtacaagtaggaagtgaattttctttactcaatgctatttcaaaagaccttgaaaaaggaacagattataacttaggaatggaaatcaaacaaggtatatatgaaagttacagagctgaagaaggtggagcagttatagaacatgaggaaggagcacctaaaaagaaaaaaggtggcttgttcgctaaattgtttggaaaaaaggaagaagtaccacatggtgataatgaagtgaaaaaagagtttgcaggtgtagaggaaaatccttttgaagaaatgcctatgcatgaattgaaaagtaggggaacacatcattttgaggatgaagatattcaggggctacaagaacacgctgctgctttagatgaaaaagaagatgatgatccatttacaattgaagaagaagaacaagatgaattacccgcaggagtgaacttggaaaaagtggctgaagaactaccatttcctacaaatgaagttgattcagttcaaagtatagaagaagagctatttagtaacggttcagacgttcagaaaacaaatcaagagcctgtaattgaagctcagaaccaaggtgtaacattccctgattatgaagaatatctgaaccttagtgaagttgagacaaagcaagaaagatatgattcacgatttactatcaagcacttactaagtcggtttggtatgagtgaggaagcaactacagggcttgaaaagaaaaaaatgcaatatgtaaaaaacgtgttaagtggaaaagattttttgctgattcaagataaatattaccaagaagtaaataatttgagagatgaaatccgtttggctcttgaaaatatttataaagaagtcatgatgcgtgattatcaaaaagaagctgaagaaaggctgcaagacatttttgaacaaggtttccaaacaaggttagcagagttaaatgagtttgagaacaaagaaatgcaagaaatgcaaaaaaaattatctgtatttactgaaaaacaaagattagcattagagtcttttaaattgcagcaagaagcagaatttacggcatatcaaacagaattagaagggcgtaagaatacgttagtaagtgcgtgtgaagaagaattaaagaaagaaaatgaaattgaaaagagaaaagcaactttagagaaagtgtatgagttgaaagtagaaggcaaaaaagaactgatcaataaaaagaacgagtatttatctgattctatagaaatgacagaacagattatgaacgctgccaatgaacaacaagaagtggggtttgcggttttagaggataaaatgaagcagttaatccctgaatggaaagaagaaattcaagcagagcacgataaagaaatgaaagaacgtcaattaaaaatagaagaagaaaagaacagaattgaagtagaagcactaaacttacaacaaagaaaagaggaagcgaaagaggtaaggagcaccgatagagaacagaagctattgaatatcatagaagatttaaaagaaaagttattaaaagctcatgctaacccagaacaacagccactacaacaaccagtgatgatgtatccgcaacctgtacaacagccagtatatatgtatcaacagccagtacaacaagctccaatacagccacaacaacctgtaatgcaacaacaaacaaaaacgtctacaaaaaaacggagaacatttttagctagactaatggactctgagtaagtggttaataaggagggaatgcgaaaatgacactattaaaattcaagcggaataagtaccttcatcataattacaatattgatggtgaagacctgccacaagaaaagaataggataaataaaaaagcactcgcaatttcttcacttgcggtgctttttcctttaggtggactaaattttgtagcaggtacgtactacgccattgtaaatgaattatcaaaaacggttgaaaagccaactatttttgatgtatttggtacggattgggagaaaggtatttcaattaaaaatgtttttcttcctgttctgcctacaaatatgtacttgtttggcttattagcttctacggtgatgggttttttggtgtattcaaaggttaattatcgaagtgacgaaaatgtagcttatggtcaaaagggggatagccgttttactacaattgaagaaattcaagaacagtatagagaaattcccgaaaagacggaaatgtttgaggggtatggcggtgttcctgtatcacattataagaacaaatattatgtcgatacagatacagtcaatacagcaatactaggggtttctcgttcaggtaaaggggaaacgattgtcgtaccaatgattgataatttgagtagagcaaaaaatcaatcaagtatggttgtaaatgatccgaaaggaggcgcgacacgttcctaagtgaaaagcttaggcactgtcgaactcaacagttcagcagtgaactgtcattttgagaagtcaaatgaaggagtaacgtctggaagggcttcccttaatcctccgacatgcaggaaagtaagcaagtactgaactgtgtgaagctcggtgaagtcggttgaaggttaccgtaaattagtatctctaatacgaaagctattcagcggtggatggtgtaactgatagaccggaggtctataaaacactcaaggttaggatgcgcgatgaactagaggcgatcgctagtaagcgcagacgaatccctgatggtacgggtctatatcgggagggaatcgaaaggttctctgacacaaataagtgtcgctactgtgggtgagtaaaactctcctttatgaaagcccatatatcgttacaggcgttattaaggtagcaggctcataggggaaacctaaaagtgtatgtacagataagaatgacggaacgtggtaagctgccgacatggagggcttgttctctttgaagtgttgccaaggaaagtcacaatgagattagttgtcgatataacttggtttaacggcagtgaaagtggtggcacagtaccgatgaaacgtgtaatgaacgtggagggatagccactagtcgattgaagattgaaggttactattggttaacatggtttcgagtaagactaagagatgtaatgctccaaagtaataaggaggttacagcccatgttaaagaaaaccaagctaagacataacgaatattatgatacacaaaaaaaagtgtatgacaatttatactcgaacagtcttaacggtaacaatttctttcaattggaaacgatggaacgccgtatgcccggaaacgggcgcgtacggtgtgaagtgggggaaaagctggagataatctcaaaggcttacctatcactataattgtatagtgcatctaaagagacattagaaaaacgtgggtatgatgttcaagttttgaatatctcagaacccttacaaggaatgtcgtataacccgttacagttagtcattgatgcatgggtgaatggcgatgaccaagaagcggctaaacgagcgaatacattaacattctctctttataacaacccaaatgctggtgataatgcattctttaatacatctgcacaaaatgcgattaacggtattattctcgctatcgtggactattgtgtgaagaataactgtattgaaaagattacaatgcacaatgtatctcaaatgctaaatgaattaggtactttttattataaagagaagcctgatgattttaccgaaaagagcgcattagatgaatattttaagagtctaccgcaaggtaatgtcgcaaagatgcagtatggatcaactagctttgcaggagaaaaagcaaaggggtctattctagcaacagccaatcaagggttacaaacttttgcggataaaatgtttgcaaaaatgacttcgaaatcaagcttggatttaaaacaagtaggttttcctaaaaatctattttttcagttggatgaacgatttttgaataagcgtgtaacggtatcttttcataagaataaccaagaaaaaacggaaattttaagctatgaaattaaggtgaaagccttaggtatgtgcaacatgaactttgatgaatccctagaagatggggatttattactaattcgttatcaagatgtagaaaaccaaaaaaagaagtacagattattttatagcttacagtttgaaaaactgctagatgaaaaggggcaagttgtttatcaaaagaaagagggatgcgaacataaacctgagtatcagcgtcaagtcacactgattttaaaagctaatacttttcctttacaaccgaaagcgaagttatcgtattccaataagcctacagctgtatttatgatcgtccccgactacgataagtcgaatcacgcactagcaagtatttttgttaagcagctgtatacagagctatcgatgaattgtaatgatacaaagggtaaaaagtgttataggcgtgtccatttcttactagatgagtttggtaatatgccacctattgatgatatgggtggggtattaacggtttgtgctgggcgtaatatgctgtttaatttggtgcttcagtcatactcgcaaattgagaaactatatgataagcaagcgaaagaaatcaaacaaaactgtcaaaatcatctttatattatgtcgacagatcctgaaacaattgaagaaatttcaaaacgtgctggacatgaaactattattggaaaatcttccaatgaaagtcacttggatacagataacaaggtaacgaaaagtgcagaccaacaacgtatcatctctccagatagattatcacaatttcttgagggagaaactttagttattcgtgcattgcatagacaagatttaaataggaaaaaagtgcgaccatatccgatttttaatacacaaggaatgacaatgccttttcgttggcaatttctatcgagcttgtttgatacttcaaatgatttaaatgatattgatattccttccttacatacaggattagatttaacagagctatacctaaacttcttggattttatattaaatccagttgcgaaaaaggaatatattaaaaagcaacaagctaatcctgtagtgaaaaaagagcaaacagatattaatgaagcgattaaatcgctcattggtcttgtgaaagagaaaagaaatagaaacgacactgaagatattcagaaacgacttgtacaaatgctattagattatgcaaaacataccatcgttccaaagacggaagaagtgaagtttttaaaagaacattcttcagatgatgaaatcaagatgtatttagaaaaaatattggacatgttggtagagtaattgatttgaaatcaagcagaaaggtagaaaagtaatggctactatgaaaataaaagaatggatgttacgtagtaaaaaatctttagttctagggattttagcagtcgcaatgctatttggaagtttcacgttcacaccgattgcgtatgcttttgattggtacaaatttcttggtctgaaagatgtggatacagaaaaagcaattgtctttttaaaaaatgagtggatacaatatgctgattttttaggttctatttggcaaacaattcaaggagggataataaagacattactctatatcgtatcagcgctagaaggactaattcctgacactttttctttttttgatgtgctaaaagatgcaggattaaatgactttgcatcatctattataaagggtttattctatgccttattcgtattagttgtcgtatggttagggattagaacaattattcagcataagcccccacgttttaaatcagtaggagttaacattattgtaatgattggcttactaggtggattaaatgagttgatggcggatatgcagaagatatccactgatttcttttcggaaacgacaaacactagtaaaacaaaagatggattggcttgggatttagtcaagcagaatacagctgatctgatttatttaagtaaaacaggattcgatccaatacgagggaaaaaggaaaatgaaccagcaatttcatctacagataataaaccgaaaaatggaatgggaaaggaagtcttccttcaagcaaatttgggggatatagtgacaccagagtctatagaagatttatcaaagcaggatggaattcctgaagaaacgaaatttttatcttataaaattacaaatgatggggataaagaagtaatagaagaaataaagaatagtgtgtttaatccatttaaggataaatttccagggggctatgttcgttatccaatgaacttcgggactatatttttggggttattagctctaggagttgcttatttatttacagttttcgtatttgtgatgacgatatttgaaattgccatgaagaaaattattgcgccaattgtattcgttacagatattgaaacgggcgaaaaaacaaaaatggtaatgcaggatatctttaaagggttcttaatatttgcctttacaggtttaaatttaagattctatacaattatcgttaactatttagcagagaaaaacatcaatgcgtttttatatatcgtagcaatggtttgtttaactgtcgcattaattaaaggatcagaatctattttaaaatactttggtgttgatgttggattaaaagaaggaaagaatcacttaatgggtatggttggcggagctatggcagcgaaaggagctgtgaagggcgttggtcgtatgtttagtggtgcgaagaacctaatgagtggtggaagtggacaaacacgagaggatacgcctaaacgctctgaaatggactcgaatcatgagagtgctgatctacatggagaacaaaagaataatgctaaaggcggcggtatgcaagcgaagaaatttgctagaaatacgggcgctgcgttgagttatgctactaatcgtggagttggcggcatgatgaatgatgcaggaaataaagtggctgagactgttggtggcgctgttgataaagggaaagaaaaagtatcaggcgttgcgaaaggcgtatcggacggtgtgaaaggtactgtaagtgaatttaagagtggtcaagagcaaggtaaagaaaaggcacaagaaaatgctgatcgtcaaacactaaatacaataggtaaaggtattcaaaataatgcaaatgcaggtatagagccatctgctagccctaagatggctaatcgttcgaatgtagcttctatttcaaatgaagggcagcaaggcaatgtaaaaggcgaaagacaaacagcagaacgagaaatcgaattacaaaacaaactaagaaatacaggaagagaagaatcacagcaaggcaatgtaaaaggcgaaagacaaacagcagaacgagaaatcgaattacaaaacaaactaagaaatacaggaagagaagaatcacagcaaggcaatgtaaaaggcgaaagacaaacagcagaacgagaaatcgaattacaaaacaaactaagaaatacaggaagagaagaatcacagcaaggcaatgtaaaaggcgaaagacaaacagcagaacgagaaatcgaattacaaaacaaactaagaaatacaggaagagaagaatcacagcaaggcaatgtaaaaggcgaaagacaaacagcagaacgagaaatcgaattacaaaacaaactaagaaatacaggaagagaagttagtttgtctagcatctaaaataaaaattgacgtttcacgttgtttgtttcgtttagttttcaaagttcaatatcgcgtttcagcgacttttataatatatcatagtatattattttcgtcaacaagttttttcgataagttgtatctctcatttgctgactctgcctattatataggctttctcttccctatgcaagtattattataaaaaaataaagagagggaaaatcccctctcttattcttctgaagaaacctcttcactcgtttcttcctcttcatctttttgtgcttttgctaccgtcgctacctcttggtcttcctctaatcgaattagacgaacaccttgtgtattacgtcccatttgagagatttgatcaactggcatacgaataataacgcctgccgctgtaattaacataatatcttcttcacctgtaacagatttaacagctactaatttaccgttcttatctgtaatgttacaagttttcagacctttaccaccgcggctttgcagacggtattcatcaatcggtgtacgctttccgtaaccatttttcgttacaattagaacatttacatcctcttcgacaatttccatacctacaacttggtcttcatcgcccaacgtaatagctttaacacctgcagcattacgtcccatagaacgaacatcttgttcattgaaacgaattagcataccgttacttgtcccgacaataatatccttatcacccgatgttaaacgtacagatattacctcatcctcttcacgaagagaaattgcaattaaaccatttgtacgtatatttgcaaatgatgaaagtggcgttctcttagaaaccccttgttttgtcgtaaagaataagaactgatcgtcaccaaattcacgaatcggaataatagcgttaatccactcacccttatctacccctaataggttaataattggtagtccttttgcagtacgactatactctggaatttcatatcctttcgtacggtatactttacccttgtttgtaaagaataaaatatgatcatgagtagacgttgttaataaatgttcaacaaagtcatcatcattcgtacccattccttgcacaccacgtcccccacggttctgtgttttgtacgtagaagctggtaacctcttaatataaccgttatgagttaacgtaatcgcaatgttttgttcaggaattaaatcttcatcttcaataaattccataccgccaattgtaatttctgttcgtctcttatcattgaaacgctcttttacttctgttaattcttcacgaataatctcaagaactttttcttcatctgctaaaatcgcttttaattcagcaattaacttcattaagtcttgatattcttgctcaattttttcacgttctaatccagttaagcgttgcagacgcatatctaaaatcgcttgcgcttgtttctcacttaaaccaaaacgttccattaagccttgcttggcaatatctgccgtttttgaactacgaattaacgtaataacttcatcaagatgatctaaagcaattcgtaatccttctaaaatatgagcacgtgcttctgctttttctaattcataagcagtacgtctacgaattactaccttctgatgctctaaataatgatatagattttgttttaaatttagtacttgtggctccccatttacaagagacaacatattaataccgaaacttgtttgaagcgctgtatgtttatatagattgtttaatagtacgtttgcattagcatcacgacgtacttccatgacaatacgcataccattacgatctgattcatcacgtaaatctgtaataccttcaattttcttatcgcgaactaattctgcgattttttcaattaatcgtgccttattaacttgataaggtagttcagttacgataatagattgtttaccgtttgacttctcttcaatttcaaccttagcacgaagcataatggaaccgcgacctgtttcataagctcttcgaattccacttcttcctaaaattaaacctgccgtcggaaagtctggaccgggaatatattccattaattccgcgatagtaatatcaggattatgacttaatgccagcacaccatcaattacttcgccaagctgatgcggcggtatatttgttgccataccaacagcaatacctgttgtaccgtttactaataaattagggaaacgcgctggtagtactatcggttctctttcggaaccatcatagttatcttgataatcaattgtattttttgaaatatcacgtattaattccatagaaatcttagacattcttgcctctgtataacgcattgcagctgctgaatctccatctacagaaccgaagttaccatgcccatctacaagcatataacgttgactaaaatcttgcgccatacgtaccattgtttcataaacggctgaatcaccatgagggtgatacttaccgattacttcaccgacaatacgtgctgatttcttatacgctttatcagctgtaattcctaaatcattcatcgcatataaaaccctacgatgcacaggttttaatccatcacgaacatctggtaatgcacgagatacgataacactcattgcgtaatctaaaaatgaggtacgcatttcatgactaatattaatttctcgaattcgtgcttgttgttgattgtctgacatcaacgagcacctcctcttacatttccgttacacatacattgatttatatgtagaagacaggaatacttagattcctgtcattactcatttaaatatcaaggttcttcacgtattttgcattctcttggataaagttacgacgtggctctactttatctcccattaaaatttcaaatgtttcgtctgcttcaattgcatcttgaagggaaacttgaagtaatgaacgtacttctggatccattgtcgtctcccatagctgagttggattcatttcccctagacctttataacgctgaatccctggcttaggttgggccggtaattctgctaagattttttcaagttccttatcgttgtaagcatattgaatttttttaccttgttgtattttaaacaacggcggctgtgcaatatagatataaccacactcaattatttgacgcatataacgatagaagaacgttaataatagggtacgaatatgtgcaccatcaacatcggcatcggtcataataataaccttatgatagcgtgctttttcaatatcgaagtctccaccaatatttgtaccaatcgccgtaataattgtacgaacttcatcatttgataaaatcttatctaagcgtgccttttccacattaataattttacccttcagcggtaaaattgcttggaaatgacgatcgcgtccttgttttgcagatccacccgcagagtcaccctctacgatgtaaatttcactaattgctggatctttcgaagagcaatcagctaatttaccaggtaaacttgaaacttctaacgcactctttcgacgtgtcaattcacgcgcttttttcgcagctacacgtgcacgtgcagccatcgtacctttttctacaatttttcgcgctacattaggattttctagtaagaacttttcaaacgcctctgagaatacagactctgtaattgttctcgcttcactattcccaagttttgtcttcgtttgtccttcaaattgtggatttggatgcttgattgatacaattgctgttaaaccttcacgaacatcctcaccagttaaattactgtccgcatcttttaaaatgctatttttacgaccatagtcgttgattacacgagttaaagctgttttaaaacctacctcatgtgtaccaccttcatacgtatggatgttattcgtaaatgagtaaatattatttgtgtatccctcgttatattgaagagaaacctcaacctgaataccatcttttgaaccttctacgtacacaggctcttcatgaatcggttgttttgagcgatttaaatgctcaacgtatgatttaattccaccttcgtaatggaattctttcttttgcttatgttcacgtttatcttcaattgttaatttaatattacgatttaaaaacgctaattcacgcatacgagttgctagcgtatcaaaatcgtatactgttgtttcttggaaaatttccggatctggtttaaatcgagttattgttcctgtttgatctgtgtcaccaatgacttttaaatccgcaaccggaatacctctttcgtatttttggtaatggattttaccttcacgatgtacaaatacttctaattctgttgatagagcatttacaaccgatgccccaacaccatgtaaaccaccagaaactttataaccgccaccgccaaatttaccaccggcatggagaacagtcataataacttctacagctggacgtcccattttttcttgtataccaaccggaataccacgcccattatccgttacacgaatactattatcttcttcgatactaacattaatttcatcacaataacctgcaagtgcttcatcaatactattatctacgatttcccacacaagatggtgaagcccttttccacttgtagatccaatatacataccagggcgtttccgaactgcctctagtccttcaagcacctgtatctgactttcatcatatgcattttcttgcatttgcttttgttccattgacacaaagatcacctacttttccatttaaacaggggttattccctatctatttcacaatctacagtgccgttcgttacatgaattgttttcgcttcttttaatgtttcgtgttcaattccgtcgacactcgtcgttgtaacaaatgtttgcacttttccttgaattgtatttaaaagatgtgattgacgataatcatctaattctgataaaacatcatccaacaaaaggattggatattctttaacctctgaataaatcaattcaatttcagctaattttagggatagtgcggtcgttcgttgttgtccttgcgaaccaaagacttgaacatttttactattaacgaagaattgtaaatcgtcacgatgaggaccaattaaagtcgtaccacggaaaatttcacgttgtttcacagattgaaaactttcatagtatacttcttttattttcgacaaatccattgattctgatacatctacacttggtttatagacaatttctaactcttctaatccacggcttatacctcgatgaattggagctgcccattcctgtagcaaatgcaaaaattcaaaacgtttttgcagtattttcgcaccatgctcaattagttgaagtgtaaatacatccaacatcgtttcctcattcttactattcccttgcatttttttcaacaagtgatttcgttgcgtgagcaccttttgatattgacttaattcatacaaatatacaggagctatttgtcctaattccatatctaaaaagcgtcttcttacttgagggcttccttttacaagatttaaatcttctggggcaaacatgacaacgttcatcacgccaatatattgacttaacttttgttgttcaagttgatttaattttgcctttttaccttttttcgaaatatttaattccaaagacaaagaactgtttcttttttgtaatttcccctttatttgaccaaaatcttcatcccagcggataagttcgcgatcattagaggttctatgagatttcgccatcgctaaaacataaatagcttccatcaaatttgttttcccttgtgcattttcgccgataattacatttaccttatcttcaaaggaaagctctaatttttcataattgcgatagttttttaattgtatttctgaaataaacaaagggctccccctttatgcctgaacttggaaagttccgcttcctggaatttcaataacatcattcgcatatagtttgcgacctcttctattttcaagttcgttgttcacgtacacttcatattcttgtaaaaaccattttacagcgccacctgtatcaattacatcagctaactttaaaaattgtcctagtgtaatatactctgttgaaattttaatacgtttcataaaatcgctcactttctgaaagtgttcattctttcattgtactaaataaactagcattaggaaagtaatacccaaaaatcaaataagggccactagcatctttaaactagcaacccttattccttacctagtaagtacgaaccggtaaaattaattgaataattgaatcatcatttactgtacgaattaagaacggtctcattgccccagtaaagctaactttaatctctgtactatccaaagcttttaatgcatccatcatatattttgcactaaaagatatttttaactcttctccatctactttttcgcattgtacttcttcgacaacttttccgatttctggtgaattcgaagaaatctctagcatttcttgctctaaagttgataatttaacaacgttattgcggccatctcttgctaatagtgaagcacgatcaattgcttgtaggaattcttttgtatttacaaaaatatccgttttactctctgctggaattaaacgtgtcgtatcaggataatttccttctaacaatcttgagaagaataataaatgttttgtacggaataatacttgatactccgtaataacgatatctaccatttcttcagactcatctaaaattttacttaattcatttaagctcttacctggaataacaacattagcttggaattcatctgcaatgttatgtccttcaatttttgcttttcgaagtgccagtctatgactatctgttgcaatacaagttaactcgctgttatataccttccagtttacacctgtcaagatcggtcttgtttcagaagtagaaactgcaaatacagtttgtctgatcatatgcttaagtaaatctgttggtatcttaaatacatgatgttcttcaatctgtggcaataacggatattctgcagaatctaaaccatttaagttaaactctgattttccagattttatttttgtcataaaatgattttctacagaaatttcgacagtgtctttaggtagtttttttacaatctcactaaaatattttgcctgtaaaacaatgcttcctgattgagcaatttctacgatttcttttccatcttcttcgactggaataaacgattcaatagaaatatcagcatcgcttcctgttaatgtaaccccttcttcagtagctacaactttaattcccgtaaggatggggattgttgtacgagaagaaactgccttcattacatcttgtacacctcttacaagatagtctttttgtattgtaaaacgcataaagaaaaacctccggtaagtataagattttatttaattaataaagataaaaaaatagtagtaatagtaatagggcttgtggatatgtggataacccctataaaggatgtaaaaacagtctatctacatgtggatagactgtgcgtaaaacaaggtaagttattcacactattcagctactactttaaaataccattaatttcttcaacttgcttttgtaattgcgtatcggtttttagtagtttagagattttttcatgggcatggataactgttgtatgatcacgtccaccaaattcttcacctatttttggtaaagaggaatctgtaagctcgcgcgataaatacattgcaatttggcgaggaaacgcaactgatttggtacgttttttcgctttaaaatcttctaatttcacttgataaacatccccgacagctttttggatatcataaatagagataatttttggcttagaatttggaataatatctttaagtgcttcagctgctaaatcagcattaatatctttattaattaaagatgaataagctacaactcggataagtgcaccttctaattcacgaatatttgaatcaatttgatttgcgatataaagcataacttcatttggtatatcaagcccttcagcttttgcttttttgcgtaaaatcgcaattcgtgtctctaaatctggcggcgtaatatctgtaataagcccccattcaaagcgggaacgaagacgatcttctaaagtcggaatttcttttggtggtcgatcactagaaattacaatttgtttactttcttcgtgtaatgcattaaatgtatggaaaaactcttcttgagtttgttcttttccagcaagaaattgaatatcatctatcaataaaacatctacgttgcgatatttattacgaaaatcaacagccttattatcacgaatagagttaataaattcatttgtaaatttttctgatgataaatatacaacttttgcatttggattatgttcaattacataatgaccaattgcgtgcattaaatgcgtctttccaagcccaactcccccgtaaataaagagtgggttatacgctttagctggcgcctcggctacagctaatgaagctgcatgggcaaaacggttaccagagccgataacaaatgtatcaaatgtatattttggatttaacatgctctgtggtaaatgagctgaatcatcttgtgctggattcggcttaactggaggcagatcaatatcctcttcagcttgactttgaggaataataaagcgaattgctaattttgcccctgttaaatcgtatagtgtttctgaaattagttcggagtaatgagattctagccagtcacgagcaaattcatttggagctgtaatcgttaatacgtctttcttcaagttatgagccgttgttgattttaaccatgtctcataactaggcttgcttacctttttttctaattcttttaaggcactattccataaatcagagatattttccaaaggtgtccctcctttactaagatggtaaaagaataaggttgcgcaacaaatgtacaacccaataaatataaaatgtatatttatacgaaacgtattttaaaacctaaaaacgtcgtttgtatatgagatagggttttcgacaaaaaaagcaaatgtggacaactatttacccacatgtgattaaaactgtccacatgttatacacaaactgtggataaaataaaggtgtggaaaacttattcaaagtgaaaacacaactataatatcaaaaaaaagtggctatagcaatgaatttaagaaagttatccacaaaatcaataccttgtggaataaacttgtccacaacacgatatactgtgtaaaagtgcgaaaaaagtttgtggatataaaaaacgtgaaaaaacatttatccacaaggaaatataggtgctgtgtaaaagtatgtgaataggttcaaaatgaatatttgatgaaaatttctagaaccattgacattttcctagttgattaactataatttataggactgtctttaacagatattcctcagggaggtgtcatataatgaaaagaacttaccaaccaaataaacgtaagcgcagcaaagtacatggtttccgcagccgtatgagcacagcgaacggacgtaaagtgctagcagctcgtcgtcgtaaaggaagaaaagtattatctgcgtagaccactgatcgttcagtggtctttttttctaataatagtgaatttccgctgatgaaatacaggagtgtcaattgatatgaagaaaaaacatcgtataaagaagaatgatgaattccaggcggtttttcaaaaaggaaaatcaaatgcgaatcgtcagtttgttgtataccaattagataaagaagaacagccaaactttcgcatcggcctttctgttagcaagaaaattggaaatgcagtagttcgtaatcgaattaagcgcatggtccgtcaggctattacagagttaaaagatgagatagattctgggaaagattttgttataatagcaaggaagccttgtgcagagatgacatatgaagaagtaaagaaaagcttaattcatgtctttaaacgctctggtatgaaaagaataaaaaagtagcgtaaggaaatgaattacactatatacataccgatacaaggaggagtaggctttgaaaaagaaattaggtttactagccatggtcgttgcattaatggcgattgccaccggttgtagtgaaacgggtcagccgattacatcgaaaagtactgggatttggaatgaatatttcgtatatccgctttctcagttaatcacgtattttgccgacttatttaacagtaattacggtttagcaattgttattacaactcttatcattcgttttgcattattaccactaatgattaaacaaacgaagagtacgaaagcgatgcaagcgttacaaccggaaatggtgaagttaaaagagaaatatagctctaaagatcaagcgacacagcaaaaactgcagcaagaaatgatgcagttatatcaaaaaaatggtgtaaatccattagctggttgtttaccaatctttattcaaatgccaattctgttcgctttttatcatgcaattatgagaacagctgaaattaaacaacatagtttcttatggttcgatttaggacatgcagacccgttctatatcttaccggtcgttgcagcaattacgacatttattcagcaaaagcttgcaatggcaggaacagctggtcaaaatccgcaaatggcaatgatgctttggcttatgccgattatgattttaatctttgcaattaacttcccagccgcattatcactttactgggttgttggtaatatctttggtattgctcaaatgtactttatcaaagggccagaaattaaggctagcaaagctggaggctcaagcaagtgagtataattactgctaaaggacaaacagtcgagctggcagtagaggatgctttaaggcaattaaatacatcaaaagatcgagtagatataaatattgtcgatgagggtaaaagaggattcttaggtttatttgggaatcgtcctgcagtagtagaagttgtattgaagaaagatccaattcaagaatgtgaagaatatttaagaaatgttattcacgatatgggtgtggaagttgagattagtaaaattgtaaaaggacgcgaaattgaatttacaatttctggtgataatgtaggtgttttaattgggaaaagaggtaatacattgaactctttacagtatttaacaaaacttgtcgcgaatcgtaacacgaagcagtatatcggtattacactagatgctgaaaattatcgtagtaaaagaaaaagtacgttagaatcactttcttatcgattagcgaaacaagtatttaatacgaaaaaaagagttattttagaaccgatgccatcttttgaacgaaaaattattcatcaggcattatcaaatcatcaaggtatcaatacaacttctgaaggaaatgaaccacatcggcatgttgtaatatctcctaaatgaccggttgctcaaatgagtgccggtttttttgagcggaaaatagatgtggataactaaaaaacactaaacttatccactgtgaataagtttagtgttttttacatggggatataataaaatgagttattcttcttttgtagataggttcgttatggtatcctaataatttagtgaaagaaataatcatgttgaaatagagataaataagcaagtgaggtgaaaggacatggaatttgatacaattgctgcgatttccacagcgcttggagagggtgcaattgccattgttcgagtaagtggggatgatgcggttgagaaagttaatcgtatttttaaggggaaggatttaacagaggttccttctcacactattcattatggtcatattgttgatttagatacaaatcaagttattgaagaagttatggtgtctattatgcgcgcaccaaggacttttacacgtgaaaatatagtggaaattaactgtcacggtggacttgtttcagtaaataaagtattgcaacttattctagcacaaggagtacgattggcagaaccgggcgaatttacaaaacgtgcttttttaaatggacgtatcgatttatcacaagcagaagctgttatggatttgattcgagcaaaaacagatcgtgcgatgaatgtagcaattaatcaaatggaagggcgattatctaaattaattggtcttttgcgtcaagaaatattagaaacattagctcatgttgaggtaaatatagattatccagaatacgatgatgtagaagagatgacacataatattttaattgagaaagcgacgcatgttcgttcggaaatcgaaaaaatattagaaacatcaaaacaagggaaaattttacgtgagggtattgctacagcaattatcggtagacccaacgttgggaaatcatcgttattaaatagtcttgttcaggagaaaaaggcaattgtaactgatattgcaggaacaactcgtgatgttattgaagagtacgttaacgtgcgtggtgtacctcttaaacttatagatacagccggtattcgggagacagaagatgttgttgaacgaattggtgtggaacgttcaaaagaaatgatgagccaagcggatttagtattagttgttgtcaactatagcgaggctttaacaaatgaggatgaagatctattccgtgcggtacaaggaaaagactttattgttattgtgaataagactgatttaccgcaagcgattgatatggaacgtgttacagagttagccgcgggaaatcgtgttattacaacatccttaattgaggaacaaggaatagatgaactcgaaaaggcaatagctgatttattctttgaaggaacaatcgattctgcagatatgacatatgtttctaatgcgagacatattggattattaacacaagcaggaaaaacaatcggtgatgcagttgaggcgattgaaaatggtgtaccaattgatatggtacaaattgatttaacaagaacgtgggaaatacttggtgaaattactggggacacagtgcatgaaagcttaattgaccagttgttctctcaattttgtttaggaaaataatatagtgaagttgtagaaagatagagattattaggaggaataaacaatgggatacaatgccggttcatacgatgtcatagtaatcggtgcaggtcatgcaggatgtgaagctggtcttgcggcagcacgaatgggctcaaaaacattaatgttaacaattaacttggatatggtagcattcatgccatgtaacccttctgttggtggaccagcaaaagggattgttgttcgtgaaattgatgcattaggcggagaaatgggacgtaatattgataaaactcatattcaaatgcgtatgctaaatacaggtaagggaccagccgtacgtgcacttcgagcgcaagctgataaattctcttaccaacatgaattaaagaaaacaattgaagaaacaccaaacttaacgttgttccaaggaatggtagagcgtttaatcgttgaagaaggtgtatgtaaaggggtagttacacaagctggtgcagaatatacagcaaaaacagttgtaattacaactggaacatttttacgcggcgagattatcatgggcgacttaaaatattcaagtggtccaaataatcagcaaccgtctattacattatctgagcatttagaggagcttggatttgatcttgtgaggtttaaaacagggacacctcctcgtgtaaacagtaatacaattgactacagtaaaacagaaattcaaccaggtgatgataagccacgtgcattctcttttgaaacaacgaaatttattatggatcaaattccatgttggttgacatatacaagtacagaaacacaccgtttaatagatgaaaatttacatcgttcagctatgtattctggtatgattaaaggaacaggtcctagatactgtccttctattgaagacaaagtagtaagatttaatgataaaccacgtcatcaaattttcttagagccagaagggcgtaatacacaagaagtatatgtacaaggtttatccacaagcttaccagaagatgtacaacgtgacatgcttagaacaattccaggcctagaaaatgttgaaatgatgcgtacaggttatgcaattgaatatgatgcaattgtgccaacacaactatggccaacacttgaaacgaaaaagattaaaaatttatatacagcaggacaaattaatggaacttctggttacgaagaggcggccggacaagggcttatggctggaattaatgcagcatgccgttctttaggtaaagaagaagttgttttaggtcgcgaggatgcttatattggcgtcttaattgatgatcttgtaacgaaaggtacaaatgaaccatatcgtttattaacgtctcgtgcagaataccgtctattattacgccacgataatgctgatcttcgtttaactgaagttggtcgtaaaattggattaattaaagaagagcgctatgagcgatttacaaataaaaaattacaaattgaacaggaaaaggaacgtttaagcagcattattattaaaccacgtcctgaagttcaagaattaattcgcaatattggcggaagtgaattgaaagatggaatacgtgcaagtgacttattacgtcgtccagagatgacatatgagcatattcatcttttagtaccaagtgaagtagaattaagtgatgaagttaaagaacaagttgaaattcagattaagtatgaaggatatattgaaaaatctttacagcaagtagagcgtatgaagaaaatggagaataaaaaaatccctgtagatattgattatgatgcgatttctagcattgcttcagaagctagacagaaattgaaagatgttcgtccactttcaatggggcaggcttcacgtatttctggcgtaaatccagcggatatttccattttacttgtgtatatagaacaaggaaaaattgcacgcgtatcgaaccaataaatagtaaggagatattgctagatgaacatagaacaatttcaatctatgctagaagagaagggaatcaccctctcttctagacagttagagcagttcaaaatctactttgaaacattagtagagtggaatgaaaaaatgaacttaacggctattacagaaaaagaagaagtatatttaaaacacttttttgattccattacagctgctttttattatgatttttcaaaaccattctcaatttgcgatgttggtgcaggggctggattcccaagtattcctttaaaaatttgtttcccgcatttaaaagtaacaattgtagattcgttgcaaaaacgtattaatttcttaaatcacttagcacaaaagttagaattaagtgatgttgcattttgtcacgatcgtgctgaaacgtttgggaaaaaagaaggtgtacgtgaatcatacgatattgtaatggcacgtgcagttgcgcgtctttctgtattaagtgagctatgtttaccgcttgtaaaagttggaggaacattcattgcaatgaaaggtgcagcagcaaacgaagaaattgaaaatggcaagtatgctttagaggtgctaggcggagagttaaaagagatgtctacgttccaattaccgtttgaagagagtgaacgtaatattttattaatcgagaaaaagcgcaagacaccaaagaaatatccacgcaaaccgggaacacccaataaattacctattgaaaaataaatcttattagacgtaagattaaattatataaatgaaaacgtaaatgtttcataggaaacattttatggagaatagtcaataggcctaaaaggtggtggaatatgtatgaaaaatacgttttctcgtttatttggctttggagataaagagagcgaattcgaattacaagacgaaagccatgaagagatagataaaaaggtatatgaagaaatacaagaaattccgatagtaaatattacccctaaccgttatcaaccaagaacagtttttgatgatgcgcgtattgatgagctagcattaacaattcgtacacatggacttattcagccgattgttgtaaggcaatatgaggatgataagtacgagattattgctggagaaagacgttttcgcgcggcaacaaagttaggttgggaaaaggttcctgcaattataaagaacttaaatgatacagagacagcttctgtagctttaattgaaaacttgcaacgtgaggaactaacggcaatcgaggaagctgtggcatatcaaaagctgattgagttacataatttaacacaagaagcattggcacaacgacttggaaaaggacaatctacaatcgcaaataagttgcgattgttaaagttgcctgaagaaataaaaagtgcattattagaaaaaagcattacagaacgtcatgcccgcgctctcattcctttaaaaaatgaggaattacaactgaaagttttacaggaaattgtggagaaacaactaaatgtaaagcaaacagaagaacgaattgcgaagttactagaggaagcgaaaccgaagcgtaaggcaaagcaaaaagcagtaagtcgagatacgaggattgctatgaatacaattagacaatctttacaaatggttactgaaagtggtttgaatgttaattctgaggaagaagaatttgatgagtactatcaaattacaattaaaattccaaagaaaaaataataatgacgtgctagagaccttatcctattggagaggtctcttttactatattttcttgttaaatgaagaaggagtttagaaataaattttgaagtttaataaaggacgtaaaagaaaaagttttatttcatgttacaataaacgtaattgttactagaataagatagaaaggttgaaagtaggtgacatcatgggaaaaatcattgctattgctaatcaaaaaggcggtgttggaaaaacgacaacatctgttaatttaggggctggattggcgcaagtaggtaaaaaagtccttcttgtagatattgatgctcaaggaaatgcaacgactggtgtgggaattgaaaaatctgaattagatcaatgtatttacaacgttcttgtggaagatgcagatgttcaaggggttatacagaaaaccgcaactgaaaacttagatgttctacccgctacaattcaattggctggtgctgaaattgaattggtaccgactatttcccgggaagtacgtttgcaaagagcattacagccagttcgtgatgaatatgactatattattatcgactgtcccccatctttagggttattaacgattaatgcattaacagcagcagattctgttattattcctgtacagtgtgaatactacgcactagaagggttaagtcagctattaaatacagttcgacttgtacaaaaacatttaaataaaaatttagcaattcaaggtgtattgttaacaatgttggatgcccgtacaaatttagggatccaagttatagatgaagtgaaaaagtattttagggataaagtatatcgctcgattattccgcgtaatgtacgcttgagcgaggctccaagtcatgggaaacctattatgcagtatgacgctaaatcaagaggagcagaagtatatatagatttagcagaggaagtgattgcaggtggctaaaggattaggaagaggaattaatgtgttttttcctgatttagatgtgaaagaagaggaaacaattcaggagattcttgtaactgaattaaggccgaatccatatcaaccgcgtaaacactttaataaagaggcgattcaggaattagcaatttcgattaaggaacacggtattctacaaccattaattgctaggaagagcattaaaggatatgaaattgttgcaggtgaaagacgatttcgtgctgcaaaagaggctggtttagaaaaagtacctgcggttgtaagacaattaaatgaacagcaaatgatggaatttgctttgttagaaaacttacaacgagaagatttaaatcctatggaagaggcaatggcataccagatgttaatgaatgagctaaatgtaacgcaagaacaattagcgaaacgtcttggtaaaagcagaccttacattgcaaattatactaggttattaagcctaccttctttcgtacaagatatgattgcaaatggtcaactttcaatggctcatgggagaactttacttacgataaaagatgaagaacaattgaagtccttattgaaacgcattgaaaaagaaggattaaatgttcgtcaattagagaaaatcgtccaagagattaatcaacacgtttcacgtgaaacaaaaaaagtgaaaaaagagcgaaatatatttttcgtagaacgtgaaacgttcttaagagaaaagtttggcacagatgtgaaaattaaagagacgaaaaaagaaaaaggtaaaatcgaaattgaattttttaataaagaagatttaaatcgtattttagaactattagcacagaaaaattaaaaagcaaaccatcttattatttatagatggtttgctttttttaatgcggataatttttgatccgtctcttttatactttgtgcgattacatcagccattttcatgactaaacttaatcttgtattttgaagaacgaaaaactccataaacccatttagattgacgataccgtgtatgtgcaaatcaccaactgcaggtaatttcttattcatagcagctccaggtttactaggtccctttccagtagtgattgatccgatattttgggactttcctaaacatgcatcaacagcaattataaatgcagtaggatattctttctgtatattctgaattttctcttctaaatttagcgcatgtactggctcatctagtgtaccgaatacttggaggttttggatgtctatttgttcaagttttgtaccaactaatgggccgagtgcgtcacccgtagagcgatctgtgccgatacaaacgagaatgagtggtatattagttttaataggaatatgggtaagtaagaaattactgattatctcggaggcttctagatcttggtgcataacgttttgagtttctttctcaaaaaatggtaagcgaaaacttccaatattcatgaagcacccatccttttaataaattttcaatatgtgttatatggtgaggaaaatggaaagttataagtgcgtaatttttgcaaaatgtgaatgaaaacggaaataatagtactagtatatatatattcgttccattttatacctggatatcggggataaaataggattaaaatcataaaattttttcagcaattaggggacttctgatacaataataagggtaactaaaaagaaattttagctagagaggtagaggtacatggatttattaacgaagtggtttaattctatgaaacagtatttattagatgctgatcgttgggctcatattggagttgcgacattaaaaatatgcattattttaataattggtgcggttgttgtgcgaattgcaagagcggttgtacgaaatgcgtttcgcatgggaagtcgttctccaattcaaatttcagaacgtcgtacagttacagtagcgaaattacttgaaaatattgtagcgtacgttgttatgttcattatgctaattgcgattttaggtgtgtttgatattaatgcatcaggtttattagcgggtgctggggtaattggtttagcagtcggatttggtgctcaaagtttagtgaaagacgttattacaggtttatttattttgttagaagatcagttttcagttggcgattatgttaaaatcggtcaatttgaaggagtcgttttagaaattggacttcgtacaacgaaagtaaagagttggacaggtgaaattcatactttaccaaatggaagtattattcaagttactaactactcagttagtaatagtgtagcgtttgttgatgtatctatttcatatgaggctgatattgcgaaagcagagcaggttattgaagatttattagtagaattaccttcaaagtacgaaaaaatggtaacaacgcctcaattattaggtgtgcaaacattagctgcatcagaagttatattacgtgttattgctgaagtagaaccgatgcaacatgcagttattgcaagggcacttcgtaaagagattaaaaatcgtcttgatttacatgggattgaaattccatatccgcgtatggttttatataatcgtgaagaattagttagtggaaaagcaatttagtatggagaggagtttggagagtggagcaaaaggaatataacttgtatgatgttgtggaaatgaagaaagcccatccatgtggcgagaatcgttggaaaattattcgtatgggaatggatatccgcattaagtgcgaggggtgtgaccattcagtaatgattcctcgaagagagtttgatcgtaaggtaaaaaaaatacttgtgaagcacgaagaatagagggagagtaacagttacagtaggtaactgttactttttttcgtttggcggaaacttgtcatttttttcgttactatctataatgatgaaagattgagacataggagtgaaaaatatgggattaacggctgggattgttggattacctaacgtagggaagtccactttatttaatgcaattacacaagcaggagcagaatctgcgaactatccattctgtacaattgatccaaacgtagggattgtagaagtaccagatgagcgtttaaataaattaacggaactagtagaaccgaaaaagactgttccgactgtattcgagtttactgatattgcaggtatcgtaaaaggtgctagtaaaggtgaaggtttaggaaataaattcttatctcacattcgtcaagtagatgcaatttgtcaagttgttcgttgttttgaagacgaaaatattacgcacgtttcagggaaagtagatccaattgatgatattgaaacaatcaatttagagctaattttagcggacttagagtctgttgataagcgtatcgagcgtgttgcgaaattagcaagacaaaaagataaagaagcggtatatgagcatgaaattttagttcgtttaaaagaagcttttgaagagggaaaaccagctcgtactgttgaatttacagaagagcagatgaagattgttaaaggccttcatttacttacaacaaaagaaatgttatacgtagcgaatgtaagtgaagacgatgttatcgatccttcggaaaataaatacgtacaaatggtaaaagaatttgcagcaaatgaaaattctcaagttatcgttgtatgtgcaaaaatcgaatcagaaatcgctgaattagacgaagaagagaaaaaagtattccttgaagaattaggaattgaagagtctggtttagatcaattaattcgtgcagcatatgatctattaggacttgctacttactttacagctggcgttcaagaagtacgtgcttggacatttaaacaaggaatgaaggcaccgcaatgtgctggtgttattcatacagactttgagcgtggatttattcgtgcagaaacagtttcttacgatgacttaatgacaaacggttctatgacagctgcaaaagaagctggaaaagtacgtttagaaggaaaagaatatatcgtaaaagacggagatgttatgcacttccgttttaacgtttaatttaatatttcctaggaaaaataaagatatgagcttggcaaatatattatatgtttgccaagttttttatgtattggtgagttgattcatataacttactatgatataatctaaactcgtgagtaattactataaattaattgctccttgcccattacgggccgtttagaccaaaaggaggtgaaagtgtaatgagaaagtacgaaattatgtacatcattcgtcctggcgttgaagaagaagctcaaaaagctttagttgaacgttttgcaggtgttttaacaaacaatggtgcagaaatcattaacacgaaagagtggggtaagcgtcgtttagcttacgaaatcaacgacttacgtgaaggtttctacatgatcttaaacgtgaaatctaacgcagaagcgattaacgaattcgaccgtttagctaagatcaacgaagacatccttcgtcatatcgttgttaaagaagaagaaaaataattgatatataagggagagtggttcgattgatgaatcgtgttatcctcgttggtcgtttaactaaggaccctgacttacgttacacgcccaatggtgttgcagtagctacttttacgttagctgtgaatcgcgcatttgccaatcaacaaggtgagcgtgaagctgactttattaattgtgtaatatggcgtaaacaagcagaaaacgtagcaaattatttgaaaaaaggtagcttagcaggcgtagatggacgtcttcaaactcgtaattacgagggacaagatggtaaacgtgtatacgtaacagaagttcttgcggaaagcgtgcaatttttagagccgcgtaatggcggtggggagcaacgtggttcatttaatcagcaaccatcaggagctggtttcggtaaccaaggctctaacccatttggtcaatctagtaattcaggtaaccaaggtaactctggatttacgaagaatgacgatccattttcaaatgtaggtcaaccgatcgacatttccgacgacgatttaccgttctaatacagtaaatttgttagttttaacaaagaatggagggaaatagacatggcaggacgcaaaggtggacgtgcgaaacgtcgtaaggtgtgtttcttcacagctaacggcatcactcgcattgactataaagatgttgatttattaaaacgtttcgtttctgagcgtggtaaaattttacctcgtcgtgtaacaggaacaagcgcgaaataccaacgcaaacttacagttgcaattaaacgtgctcgtcaaatggcacttttaccatatgttggtgaataatagcgtatgaaatgcacagtagagtcggactctactgtgcattttgctatgcttttcttttttgaaagagaggttaaaatgtgaaacaagcaagatttattactgaaggtgccgcgttgttggctatatatgcaatgttattgcttatatctatgtatgttccgattttgggtacagttgtaacttttgcgttgccgttaccatttatactattaatgataagacataaactatctaatgtgctcgtggtttttgtagcggcactttttgttactgttattgtgagtcaaccgatgaatttagtgaagacaattatgtttggattgatagggattgttttaggatatatgtataaaacaagaaaaaagccagtggaaatcttaatagctgggacgcttgcatacttaattggttttgtacttatttatgttgcgagtataaagtttttcaacatagatataatgaagcaaatgcaaagtatatttagtgaaagtatggcgaaaagcgaaaagatagtaagtgctacaggtatgccgattagtaaggaacaaaaagagttacttgcacaaatgaatgatatattacaatcattacttccgagtatacttgtgctagtttcagtatgtttttcttggattacagtgataatatcaggtagtgttttgaaaaagttaaaacatgacgttatatcttggcctaaatttaaagatatacaattaccaaagagtatcatttggtattacgttatatttattttgttagcaacttttataaaagtagaaccaacatcatatttacatatggtattttctaacctaaatgtcatatttgcactattgcttgtactgcaaggtctgacatttatcgcctttttagcgtatagaaaaggttttactaaaggggttcctattattagttttattgcatgcatgtttattccgatgctgtttcctcttgtgacaatcttaggtataattgacttagggatttcattgcgttctaaaatagggggataaaataatattccttatactattttaatctgtttaactaactggaaggtgagttagttttactttataggagttgtatacatgcctgaatttgataagaaacagtggtttttatatcctgtttatgtattggcattttttgtgtttgtgctcatttcaattctctgttattttcatttaattatggggatagctgcttttgtcattttttgtatcgtattctttatcgttatacgatttgaacttaattttcaaaggaatttcgaaaagcatacgacagatatgattacaagagtaaagaaagtaagtaatgaagcatttaaccaaatgccgattggtattttgttatacaataaggattatgggattgattgggcaaatccttatttatcttcatgtctgggacagcatgcattagctggatggcacctttacgatgtatcagaaacattacttcttttcattaaaggagaaacttctgatgatatagtctctttaaataatcgaaagtttcgcgtttttgtaaggaaagaagaaaagttaatttatttctttgatgtaacggaacaaacagaaatcgaaaagatgtacgaggatcaaaggactgttttagctgtcatctatttggataattatgatgaagttacacaaggattagatgatcaattacgtacgaatataacaagtcttgtgacatcgcgactaaatgaatgggcacttaagtatggggcgtatttaaaacgtgcatcttcagaaagattcttcgttgtgctaaatgaaagtattttgacgcagatggaaaaagggaaatttagcattttagatcaggtgcgtgaagaaacatctaaaaggaatataccacttacattaagtgtgggtgtcggatcaggtgatttacctttatcagagcttggagcaatggctcaatctggtttagatcttgcgcttgggcgtgggggagaccaagtagctattaaacaagcgacaggtaaagttaagttctatggaggtaagacaaatccggttgaaaaacgtacccgtgtacgcgctagggtcatttcgcatgcgttaaaggatttagtattagaaagtagtaatgtcattattatggggcatagggctcccgatatggacgcaattggtgctgcgattggtattttaaaagtggctcaattaaatgagcgtaaaggatatattgtgttagatgaaaatgattccgataaaggaattaagcgtttgatggacaaagtgaaacaaaatgaggagttatggtctcgttttattactccagagcaagcgatggaatttgcaaatgatgagtcgttacttgttgttgtcgatacgcataaaccttctatggtgatggagcaaaaactgttacataaaattgaaaatgtagtagttattgatcatcatcgccgtggagaagattttattgaagatccattgctagtttatatggaaccatatgcttcttcaacagcagaattggttacagaattacttgagtatcaacctaaaaatttaaagatgacaatgttagaagcgacggcattgttagcgggtattattgtcgacacgaaaagtttcacattccggacaggggctcgtacatttgatgctgcttcttatttacgctcacatggtgcagatactgtacttgtacaagaacttttaaaggaagatatggatcagtatttacgggttgcaaaagctataaaaaatgcgtacatttataaaaatggaattgcgattgctaaagttgatagtgatgattactacgatcaagtgcttattgcgcaatcggcagacacgttattaacgatgacagggattattgcatcatttgttgttgcgaaacgcggcgagaatctcattggaattagcagcaggtctttaggtgaagtgaatgtgcagctaattatggaaaacttaggcggtggcgggcatttgacgaatgcagccacacaaatgaaaaatgttacagtagatgaagctgaggagaagcttcgatttgttattgatgactatttacagggaggcacacaatcatgaaagtaatttttctaaaagacgtaaaaggtaaaggtaaaaaaggagaagtaaaaaacgtaccagatggctatgcaaataacttcttactaaaacaaggattagctgctgaagcaacaaatagcagtatgaaaactttagaagctcaaaagcgtaaagaagaaaaagatgcagcagcagagcttgaaaatgcaaaagagttaaaagagactttagagaaattaactgtagaattaaaggcgaaatctggagaaggtggccgtttatttggttctatcacaagcaaacaaatcgtagatgcaatgcaaaaatcacacaagattaagcttgataaacgtaaatttgaaatggacgatgcaatccgcgcgttaggttatacaaacgttactgtgaaattgcatccacaagtaacagcaacagtaaaagttcatgttagtgaacaataaaaataaattaagcaaggaggattgcgtatgagtgatgtacttgctgatcgtacccctccgcataatatagaggctgagcaggcggttttaggggccatattgattgatcaagatgcgttaacttcagcatcagagttattggtacctgattcgttctatcgaacgaaacatcaaaagatttttgaagtcatgcttgggctatctgataagggagagccgatcgacttagtaatgatgacatcagcaatggctgatcaaggattactagaagaagttggtggggtttcttacttagcagagttagcagaagttgtgccaactgcagctaacgtagaatattacgcacgcatcatcgctgaaaaggcgcttttacgtcgtttaattcgcacggcgactcatattgtatcggatggatacgagagagaagatgatgtggatggtcttttaaatgaggctgagaaaaaaatattagaagtatcccatcaaacgaatgcaaaagcattccaaaacattaaagatgttcttgtagatgcttatgacaaaattgaacttttgcataatcaaaagggtgaagttactgggataccaactgggtttactgaattagataagatgacagcaggtttccaacgaaatgatttaattatcgtggcagcacgtccatcagtagggaaaacggcattttcattaaatattgcacaaaacgtagcgacgaaaacggatgaaaatgtagcgatttttagtttggagatgggtgctgatcagcttgttatgcgtatgctttgtgcagaagggaatattgatgcacaaagacttcgtactggttcattaacttccgatgattgggcaaaattaacaatggcaatggggagtctctcaaatgctggtatatatattgatgatacgccaggtattaaagtaaatgagattcgagcaaaatgtcgtagattaaagcaagaacaaggtcttggtatgattttgattgactatttgcagcttattcaaggaagtgggaaatcaggagaaaaccgtcagcaggaagtatctgagatttctcgtaccttaaaagggattgcacgtgaattgcaagtgcctgttattgctttatcacagttatctcgtggtgtagaatctcgtcaagataaacgcccgatgatgtctgatattcgtgaatctggaagtattgagcaggatgctgatattgtagctttcctatatcgtgaagactactatgatcgagaaacggaaaacaaaaatacaattgaaattattattgcaaaacagcgtaacggtccagtaggttcagtggaacttgcattcgtcaaagagttcaataagttcgttaacttagaacgtcgttttgaggatggacatgctccgccggcataaaggcagtataaaaaagaaacacatttcttataataagatgtgtttctttttttttataagaaagataaggctttcataagttaaatatataattcttacgaacgaaaaagtttttttatgaaaaaatgttcgcttttcggttgacttctttttcggttttggtacaattatattgtttgaatagatcgtttgaaaattgcggaggtgctttaataatgtcttcagtagtagttgtaggaacacaatggggcgacgaaggaaaaggtaaaatcactgattttctttctgagcatgcggaagtagttgcaagatatcaaggtggaaataacgcgggacatacaattgttttcggcggagttaaatataaattacacttaattccatctggtattttctataaagagaaaatttgtgtaatcggaaacggattagtagtagatccaaaagcattacttgaagagttaaaatacttacacgatcgtggtgtaagtactgataatttacgtgtaagtaaccgtgcacatgttattttaccttaccacttaaagcaagatgagttagaagaagcaagtaaaggtgataacaaaatcggtacaacgaaaaaaggtatcggtcctgcatatatggataaagctgctcgtattggtattcgtatggctgatcttttagaccgtgaagcatttaaagagaagcttgagcgcaatttagtagaaaaaaatcgtttatttgaaaaaatgtacgatacagaaggtttcactgtagaagaaattttcgaagagtacttcgagtacgggcaacaaatcgcgcaatatgtatgtgatacgtctgttgtattaaatgatgcattagataataatcaccgtgtattatttgaaggtgcgcaaggtgttatgcttgatattgaccacggtacgtacccgttcgttacatcttctaacccaattgctggtggtgtaacagttggaactggagttggtcctgcgaaagttactcgcgttgtaggtgtatgtaaagcatatacaagccgcgttggtgatggtccattccctactgagcttcatgatgaaattggtcatcaaattcgtgaagttggtcgcgagtatggaacgacaactggtcgtccacgccgcgtaggttggttcgatagcgttgttgtaagacatgcacgtcgtgttagtggtttaacggatctatcattaaattctatcgacgttttaacaggtattccaactcttaaaatttgtgttgcttacaaatacaatggtgaagttattgatgaagttccagctaacttaaacattttagcaaaatgtgagcctgtatatgaagagcttccaggttgggaagaagatattactggtgtaaaatcattagatgaacttcctgaaaatgcacgaaaatacgtagaacgtgtttctgagttaacaggaattcaaatatctatgttctcagttggaccagatcgtaaccaaacaaatattgttcgtaacgtatacgaagcttaattaatagtgtttagaaaaaaactcatgtccgcatgagttttttcttattcttttataaaaaaacgaaaaaagtattgcaataaatacagaatacatgttatgatacatcttgtcgtcacgaaaatatgacgttggtgaatatgagccattagctcagttggtagagcatctgacttttaatcagagggtcgaaggttcgagtccttcatggctcaccattttatttttcgtggcccgttggtcaagtggttaagacaccgccctttcacggcggtaacacgggttcgaatcccgtacgggtcatgtttttttttgcttatttttggtcccgtggtgtagtggttaacatgcctgcctgtcacgcaggagatcgccggttcgaccccggtcgggaccgccatcacgggtttataggtaaatccctttcctaaaaaacctaactttatcatacgaggaggtggtaaacaaactgtagtcattcaaaccggaatgagttgctcattttatgattggcttcctattataaaaaagctttcacagcactttacagtcgtttcataccatcgcccaggttatgggaaaagtgagctaggaaatcaaccacgtacaataaggcaagttacaaaagagctgcatatgttactaaacaaactagctattcaagagccatttattctaatcggtcattcctatggaggattatgtgcacaacattttgcgatgttacatgaagataagctgcaagcacttattttagttgattctacttcgatgaacttacaccgtttagatgaacttcatttaccaatttctgatcaaactgactcggatgatatgtggcttgaaaaatataatacatactccaaaatagatgtagacacactttataatgaactaaaacctattctcaccgatcaatcaaaacagcaaattggattctctacctcgccttcattatataaagcgacagcttctgaactatcggagtggaaaaactgtgctctctcactaaaagagctatgtaaaacattagaaataccattaatcgttatcggtagagatcctcaatattctattactcaattgactaatggtggcatgccaaaagaggaagcaacacaacttgaagcaatgtggcaagaactgatccatgaacaattacaactctcaatacatagccaatatatacttgccgaacatgctggtcacggaatcgaaattgatcggcctgatattattattggggctgttcaatctctataaataaaaaaaggaagcaactaaagttgcttccttacttatctattcataatcttcttcatcatcgatttcttcgtaataagcattcccattacttacataaatagggccattcgcaacatcaatacgtaatacccatgcccatggcacagctaaacgcttatgtattgctcgccaaaagctcattgattttctttcgtactcctggaactcctgaagtaactctttataggaggaaccgtctaactgaatatttgcttctagcaaacgagaatgggcatagtactgcagctctagttcagcagcaatttccatttcttcttctgttgccataccaataattgttccatctgctggtgcaatttcatatacgttgtgaacttcaataagcccttctttctctttctcaaacatgtaaacagcctcctttaacatatattttttatgttacaaagtcatacttctacaataacttctctctttcctctttttttgataaacttttacaaaatatttaaccgatgacctgttttctctattctttcagcagaaatgaaacgatttttatcaaaatttaatttatacacatcaggcatatgaagtgttttccaaaactccaaatcatatttcgaattaaaataattcattagtaataccataatattcccatgcgtacctattacaatattcttaccttcatatttttttaatatattttgtatacatattacagcgcgcttttgtgctacagtatttgattctccgccttcgtatgcaaaactccaatctttccacacattctgcatagcatcattaaaatttgatactggctctgtgctcaataatctttcacgcaaatcttcttcagtttgtattgataatttatatgtattcgcaattccttttacagtttggattgctcttttgtaaggactagaaataacaacatcaatatgtttatcttttaataaatgcgttacattttctgcatcacagtgccctttttcagataaaggtcgttcccgttcttcttttgtatatgtagaatgggcatggcgaacgaaatatattgttgtcatttttcaacctcctttcttattttccatctatattcaataataagattggaaaatcctgtattacaaaagagcatttttcataagtgcccctttgtttacataataaaattatttcattataatttatttctgaatttctcacttatgacaatatctcgaataaagtaatccatattacttagaagtttttcaaatgctttttcactcaaattgttcatcataaagacaatctcaatcttattcccttttttatcagtaccatagaaactatttgttaatacaaatgccgtagaaccacctttctgtccagcaaattcgaatataccctctcctacggttcctttaaatatattctcaacctcaccttgcatttgtggtgtaaaataatttctgctatttatcttttccaataaactcatgtaatccttagcatttgcacctataaaccgatctgaccaaatacgctgaaaatccatatcggcttttaacgatatctcgcgttttgtccattctttctcgtctttcatccattcatgtatttgccatacatgcttaacatattcatcattagacatattacgtagcttgtccaatgctttattttgaggaatatgcagttctttttcaacatagcccctcatatataatgcccctgtatacgttggataaaattcatcgtgactatttaagcctaactctttcaaactttcatttatccgcgctgctccaagcttgtccaataaatatgatgcattcgcattcgaactataatggatcattcctttcactacttcttctaaagaagtttgaccacccttcactaactctttaccttttacatcatctagccatgcagggtgtgcaccaccatcagtatttttctaattctttcaatgaaattttctcgtcttttcttatttttccttcagctacttgcttagcatattcaattgctataacgattttcgacatacttgctagcggtaatttttctttttcatttattgatgtcaatgtttcaccatttcttttaacaattaaagaagttgttttatcatccttatgttcttttatgtaatttagcacataattagagtcttctttggaattgacatattccttcactgaaaagaaagctatacagcctactatagtaattccagctataattccaacaacttttaatcccctcatgatactccccctaaaataaacatattatatattatactaaataaatttccctttttaagtaataattagattatttatacaaaaacacttcttttcttaaacaacaaaaaaacatgccttcattaggaaagcacgttttgtgatattcttcacattgtttagttaaaaaataaatgtttacttaccatgatgtaacattaaatcactaagttcttcttcaatgtgatttaatttcgcaacgccttctttccatttatgaatataacgtgaaaccccaacgaaaaacaaaacaataattgtggaaagaataataccatatacgattgctacagtactcatagttacacttccttataattagtaatgtggttattagttatatttttattataaacctttttcttttaaaatacttcgatttcaactttttgtaacaaaattgatttttctaacatttcgttcgtgaaaatggcatatttttcacaaattatacaaaacttcaccatatgtactattaccatatgagttatattattaaatagaataaaggggatgatatactatgacgacttggtttattgtaatgttagttgtatttggagcatttaaaattatcgtttctagccttcctaacactgttattgaatccattattagcaagtacgaaacacatccaaaacttgaagaagagaatgtgactattacaattcacggaaataacgtagaaggcgaacagaaatcaaaaattattcatgattttaacgaaggtttatttttagatcgctattatgcaccaccacacaatgagggtacgcctttaattatcaatgcaaaacgtggcaaaaagaattttacattttatatttatagtcacgaggagcatgttgatgttgtaaaacaatataaaaagaaggtagttgcttatagtttacgctctaaaaaccttcaaaatagtgatatgttcgtgtcagctgacttagcttaatactcatatattggaaaaaggaatccacgaaatatggattccttttttctcatttactgaaaaataagctctgtcttcaaactatctttcggtaacaaccagccttttttctctaaactcgccattaataattccctttgctttgtcgcaatactttcttcatttgttttaaatgacacttctattacgaagtcatcttctaattttccggtattacttaatggccaaatttcaatatttgcttttatgttttcaaactctcctgtatatcgtttcattaatacaggaccgtaaatacgggaattctttaacatttcttctccccaatttgtatacaaccatttgttcattttccctggtaatctttctattaacatgttttgagcagcttgttcatttggtaaatcaagtatcccatatcctttagcgctgtaacttttcttatttgaaatgcttaatgttttcttctcaaatccccaatctatttccgcctcataactatccgtattactatcgaatccttcttttttagctacttctagtgcatcttgaattacaccatttggaataggatatctttttttatatgttaattcaaaatctttactaaattctttctttcgaattctagcaaaccaaccttcctcgcttaaacttttattcgcagtatctaaaaattgcacttgtattctttcatattttgtaccagcctggaaatgttctagcacctcttgcttcatctctttgttatcacctaatacttgttctggcttcaataataactttacttcaaaactaggtttcattggactagctgcaaacccttccttaacgttataaaggaaacaacaaaagaaaatgcttacgaatacaaatacttttttcatatacctatcccctttacatttcaaatgacttctatacgttccattgcaagtgaatatacattttcataccctgctgtacttagcttttgttgtaatcgatccgtatcctctttcaaagcgtgcactaacaccgtatgttctggtaataatgtatttagcatctctttaacgtctcttatactttggtgaactttatacggaactctcttcaccctacatgtactccttacatgttctttcataactttttctgcaaaactccctttcgcaatatgcccagtaaaaataacggcattccgtttttcattccgaagttgttcatagtataactgtgctcgtttcgtttgcatattcgcatcactcattacaactattccgtaactattttgcatactaatgtcattatccataactattatgtttctttttaaactctccataatccatttaagttcttcattattttttatccaacctttatatatgaacatctcttcaaatccagccaaaatttctttatctactataagcggaaattctttatatcgttcatataaatacaatactatatcttgcgccctaccaagttgtggcagcggtaataatgctattccttcattttgcataactcgttcaatttctgcacatagatcgtctaatctttcattttgcgaaacatcatctgtgtgataagcggcatctacaattgcaacttttatattgtggcccaatttctcaggtaaattagctcgtagtatgttagactctgctgaatagtcgcctgaataaaatacgtatgtattacacatatcaactaaaaaccaaacagctcctaatacatgcccactatacccccactgaaaccgcaatgtaggagtaatttgtaaccattcatttggattgctaatctcatcaatacatacataatttaaatcttttatatgttggtcgctataaggtaaattccatccttgcattacattatagtttctccatttttcataatataacggcagttgctccttcgtataacgagtcgtccaattttttttcttatagccatacttcgctaataaaggtaaacccatcgtatgatcttcatgaatatgtgataaaaataccgcatctaaaaatggaacagcttctctctctatttttggataaccatcctcataagatcgattaataccacaatcaaatactattttcgtctctttattttttacaaaatagcaagagcgaccgtattctcctgctcctccccatacttccactctcatcatgctaccccttttcgcttttgctccatatgttgcagcagtaataagcacattgttgtaagtccaacagaaacaacggccatcgccattcctatagatacttcaccctgttcaaattgagcaaaaataaacgttgctgacgtttctactgatggaggtaatacgagaagtgatgctactaattctcttattgaaattgtaaatgtcatcgcccatccggcaagaatgcctgggataataagaggcaatattatttttctaaaaatataaatataatttccagaaaaaatacttcctgcctgcacgagagaatcatcaatttgtccgagtgatgattttacatattgcaccgtgtaaggtaaaaacagaacaacatacgttacgataaccatgattggtgtattataaattgacataggcatatatggtgaattccaaaatagaataagacctacaaccataacgattcctggtaccatattcggtaacataccgcacatatcaagccatttttcagaggtttttttcccctttcgaatcataagtgccaaaaagactccaatcattaccgcaataatcgctgttacgagtgaaaaaagaaaactattccataaagcctctaatcccggagaccccattgtaaacaatgcctcataatgacttgttgtaaagttatttacatgtaaaccgccgcctcttaattttgaaaaagaagcaataagtatagaaaagtatggaattccaattgatacgattaataaaccaattacatacatccatgctacaacgcgcgtaaatatagacaaagtatatcttttagatttcacaccttttccactaaccattgcatatgaatactttcgattcaatacattttgcatataccaaatgagcatacaagcactaagtaataaagaagataatgctgttgcactactgaaatcaattggccaactcgaaataaatttatgaatttctgatgttaacacgtggaatcctattctacgtccgaatgtagccggtgttccaaattcagcaatcgtctttacgaaaatgagtaaagcacccattacataacttgatactaataacggcaatattatttttcttaagcgatagaaaaaacttccgccatgaactgctgcagcttcttctttactactcccaatctgaagtaacgtgtttttcagcatgaaataaaggaatgggaataaatgcagactcataattaataccatacctcctaaactaaaaaacgatgatgaaactgtctttagcatcgggaaaaattgttcaaaatagccgttaggttgcatgaacaaaatccagcccatcgatccaatatacggcggtgtcataaatggaatcataaaaacaatatctaacttactatactttcctacatctgttttgctcataataaatgccaatggaaatgcaaatattgtagcacctattacaacgagtgcacctagaagcatcgaatttagaaaaatcccagctaatccaccactctgcatcacttcaaaaggctttaaaaaattccaactgctattttcatatacactagaaaataaaataagaaaaagtggaatgacgattaacatcgccacaagtaataacgctaccgtcattccaacttgtcttactgatacgaatcgatttaccatggaatcaccatcttattgaaatactttcttaaattgttttcctatttcatcttgctctttctcaactgttttccaatcaatatttaatactggaatctcttctacatttggtctattttcagcttttatatctgttctaccaggcaataaatacgctttagaaacttgtttttgtacatcatcggataataaataatcaataaactcttttgcaccttcaacatttttactatccttcataatcccagctacacgtgggctaataactgttccgctttttggatatacaatatcaacaggttcaccctttgcttttgcgctatacgtcatataatcaacacccgcaatgaccatatctttcgcacctgttacaactgggtctaacgcttcctgatttgctcctgctactgtaacttcatttttcttaagctgctcaaataaattccatccatcttgtccattctttttcacgtatcctgttacaaagtctaaagctgaacctgaaagtgctggatctggaagattcactttccctttccattctcctttcgttatatcgctccaatcttcaggcgctgtcttcacattttttgtattgtacacaatccctaatgctgaagcactatacccgaaataatggcctttatcatctgaccattcagaacgcagcttatcagcttgtttcgcctctttataagctaacgtttgaccctctttctttaatccttccatcgctggtaaggaagcgagtacgacaacgtcaacgactggatttttcttttcagcttccattctcgctaaaattttaccagttgtcccttgaaacatttccacctttataccagttttcttttcaaagtctttttgaactttttctgctaacccttttggccctgcactatatacaacaattttcttttcattcgtatttgtactttttgcatctgcattaccctttgaactacaacctgttactacagccgaaaataataaagtacatacaaataaagacttaagcgaactgaatttcttcatacgattctccccctatatgatgaatacatttttttggcacatataacgatactggtttaccgatgcttaatttactattgtgataagctgtccatattccgagtgcccccatgtttacttttatttcataccgttctcctacatatgtaacgtgcttaatttcacctgtatacatttcgcacacttcatttttcgtccaactcacatgctctggacgaaccatttttttaccctctacaagccaattcgccttaccaacaaatttggcaacaaattcatgagacggtttcacataaatatcttcgggtgttcctttttgtaatactgctccttgtttcatgacaataatttggtctgacattgacattgcttctgtttgatcgtgagtaacatacagtgcagttaaaccaatggaatgaacgatatccataagctctattctcatttcttctcgcaaaattgcatcgagcgcacttagcggttcgtcaaacaaaataaaatgaggttttgttacaattgctctagcgaatgcgacacgttgttgctgtccaccagaaagttcgtgtggataccttttctccataccttgcaggcgaactcgctttattgcatcttctactttttctcgtaaatgattcgtttgctttgtagctcttaaaccaaatgcaacattttcaaaaacagtcatgtgcggccataaagcaaaatcttgaaataccataccgatattccgttcatgaggagatgtctttatcttttttgtagcagaatacatgcactggtctccaaaatatatttctcccttatccggttcttcaagtcctgctatcattctaagtaaagtcgttttcccacatcccgaaggtcctaaaagtgtagtgaattccccttgtttcattacaatctgcaacggctttaacgcttgtgtttttccaaatgttttttctaatccattaattttaatatccatcgtctcacctctctcccctcattcttaacctgctttcattctatatggaagatttatacttaatgttaatgtactgtaaagattaaattaaaaaacttctaataaactatttatttctatagattttttctatagttaaaataaaaaaggcggcaattcataatgaatctcttaaaattagaaattgtagtacttattaagaaatacaaaaagcttacaatcgttgcagaaaaacttggcgttaaacaaccaactattacttttcatataaaaagcttagaagaagaactcggtgtgtctttattcgaattacgttctggaaggtatttcttaacagaggctggtgaggctttgcaccattatgcttgtaaaatagatgcacttatgaaagaagctagacgtgtcacgcaagagtttaaagattttcataaaggcgctataacaatcggcgctagttatgtaccagcgacttatcttttgccagcagtcgttcatcaatttcaatgtgaatttcccaatataaaaataacgctactagttaaaatcgcccctgaaattcgaatgatgctacaaaatcacgaaatcgatcttgggataatttccgctgctccatttgatgaaccacttttaaaacaaacgaatataatgcccgatacacttgttcttgctttttccaaagaacatcatttttcaaagaaagacaatgtatcgttacaaaatatagaaaaggaacgcatactattgcatcgtaatccatctacaacgagagacttacttacacaatggacgttagcgcacaacattacattccaatcagaaattgaattagactcattagaaacgatgaaacaaattttaaaatatggtaatggaattgccttgatttctaaactggctatcgaacaagaaatacaacgaaatgagctatgctatataccaatccctgaatttgaatttcagcgtaatatttatacgattcatcatgaagacagatggaattctaaaatcatttcttttttactacagagcatcactacatttgcaacaaaaaattaaaaggctgtcgttatgcacgacagcctttcaaactataaatctatttatttttctttgcctcaatttttgcttgcgcctcttcagccttatctaatgcttctgatactttcttctctttttctttcacttcatctatactatcgacagctttaataattttatcgattccctcttcttctacctttctacgctttgccactctttcatttactttctcttccacatcttttgctttttgaagcatattctctgcatttgatattacagctttttcaagttcatcatcttttttcttttgtaacacttcatttgcaatgtctttcgcttctaaatacttaccgtcttttaatgctgttgctccctgatccattttctcagcaacttctttatatgatttcgcttcatttcctgatttctctttttctgctttttcgaaccacattgttgcatcactatacttttcatctttcaatgattgcatacctgtttcaatatatgtgtcataattgctacatccagccattacgactaatagaaaaagcataacaaaacttaattttttcatgctgttgtctccttttctttgcaagctcactttactttaacatacatgaaaaagagtttcaaaaactaaaatactaatttagtcatttttattttattaagtcacatttccttttagacagacacatccacttgctttttcattacatgcttctttactcctactaatacaactaacaataaacctacgcctaatgtcatcataacaatgctagttggcaacatatctaataataatccatacacaatcataccgagcggtgcgattgcagtagaaattgtttcaagtaagccgaaaacgcgtcctaaataacttggatctgtcgtcttttgcaaatgtacttgcatcgggatatttacaaccatcattgatataccagttaacatcataaaagcgatatagtaaataaaacttgctactttcgggatggtgactactaatggaaacactgtacataaactcaaactcgcaaataaaaacaacccaatataaacagagcgaaacggatcattcacttctttacgtactgataacgcaattgcaccaattaacatcccaactgctaacattccctctacaacaccgagttgtttcgaagatagatgcaaattttgaacaataatatatggaagtgaaacgaaaagtgcactcgcaaaaaagtttacccctactgcaattttcattaaaccatatatttcatgctgtcttttcacatatgaaaacccttcttttatactcgtcaagaaatgctctttactttcagccttttcttttttgtataaatcaaatacgataaacaattgcacaacaaccgctaaaaagaatgtaatgctattcaataggaaaaacgatttaattgaaaagaaaccaaatacaactccgccaataatcggtgctaaaatatttgataaagatgctgccgtctggttcaaggcactcgctttttgaatacgtccttcatctactaaacttggaatagatgaagttaatgaaacagagtaaaaactcgcacaaattgataataatgctgctgaaacataaataaacagaagtgatggcccaaaagtagttgcaaggataaacataataaacattgttaaactacttaacaaatcggtaccgatgacaagccattttcgattgacgcggtcagctacagcaccagcaattggtccacagattagccttggaatcgatccacaaataagcgtagttgcaaaccccattcctgaacccgttgtctttaatacgtataatcccattgcaaacgtataaataccggctcctagcaaagacgtcattttcccaatcatcattaaaataatatttctcgttgcaatcttcattcttgaatcattttgtcctatacttatatcccccatttttgacactctccccttaaaagttaaattgtgttaaacttattatataattaactttccaatttttacaacaaaaagtttaatgacatttaactttctaactataaaggagcaattatatggctactctcggtgaaaaaattaaaacgttacgaaaagaaaaaaagcttactcaaactgatctagcaggttcagaactcacaaaaagtatgctaagtcaaattgaaaatggaaaagctacaccttctatgaaaacactacaatatatcgctgacaaacttgaatgtgaaacgagttttttattagaagaagatgatgtagaaattgtaggactcattcaacaaacggagaaactaataaaagcaaacaagtacgatgaagtatatgaggttttactaccgatcgttcaaaaagagctacctcccactttgaatactgctcgtttatataaacagtttgtaacagctgcggctaaaatgaaagattacaatattgaatattacgttgaaaaggctacttctatttttgagaaatatacgttataccgggatagtacggaaacaaaattaaaattatcctttacgatattcacacgtaaaaaatatgctgaatgtttacaacttatagctagtatccgaaatgactatgaagagaaacatttagaaatggatctcattatacatatcgaattatatttatatgaagcaattatttttcttgcatgtggtgattacgaacaatgtgaaagtgtcattttagatgcacttgcattttcaaaaaaacatcaagtgtattataaaacagatgaattttatcgtattttatcttatcaaaaagtaatcacggctgataaagaacaatatttacattacataaaaaaatcagagcaattcgccatttttacagaagataatttctctgcggcggttattgatcttttaaaagctttctactacaacacaattgctaatgaatatacaattgcattagaacatttagaacaatttcgagaaaaattaaaagatgagccaatttttcaagatgatggatcatattatcttgaaaaaggaaaagctttgtatggtttaaaacaatacgaagaagctttaaaaacattgcaacgcgctatcataccagattatataaaccatccacttgatcacgcacggcttacaacagctggggcatatcgcgctctttgttatgtgaaacttaatgataaaaaaagagctcttgaagaagtaacagaagcatatgaaatcgtacaggcctatcctgattccatcttcacttcatttattaaagaaacattacaaataatacaaaaactttaagaatgtctctaaatggtatattattcctcttttttagcaaagataataatgatgggaggaatataaatgaatatacaacgtgcaatagagctttctatgtcagcagaacaagccaatgtcaattttcaaggcatgcctgttatgattcaacacgtcgatgaaagcaatgaaaccgcccgcatatatgaagtaaaaaacccaggacgcgaattaactgttccagttaatagcttagaggaaatataagaaatgccacttctcttttgaagtggcatttttcttctttcagattacttattataaatttcttcaactctttattttacatgagctgaaaaaataagaattttctacttcttttctttttgtgacctgctaaaatacaaactatggattaattattcgtactatacattaaggaggaaaaataatggcatctaatttagaaaaaaaccagccttattatgcagttatattcacttctaatttatcaaataatacaactgactataataccgttgccgaagaaatggagaaacttgcaaagtaacaacctggatttttaggtgtagaaagtgcacgaggtaattctggactcggaataacaatttcttattgggaatcacttgatgcgattgaaaattggaagaagaacaccttacataaagaagcgaaaaaaagaggtcgtgagcaatggtatgaaaacttccacctgcgtatttgtcttgttgagaaagaatttaagtttcatagaggtactttataactatgaaggaaaaattagctctcgttattgttcatgaaatatatggtgtgaacgaccatatgcatcacgttacccagcactttacttcatctcatatagacgtattctgtcctaatcttctacacttacaacatgcatttcattatcgtgatgaagaaaaggcatatgaacattttgtaaatcatattggatttgatgatggaaaaaagcaaattgaagaattcatttctcatctttctagtagttatacacatattggacttatcggctttagtgttggagctaccatctcatggctatgtagtaacaatccgaaaatagattttattatcggatgttacggttctcgtatacgcgactatgttcacataaagcctacatgctctacattacttatattccctgaaaaagaagctagtttttcagtatcctctttaattcacacattgcagcaacaaaagaatcctttattagaaataaaacaactacacggtgaacatggatttctaaatccgtacactgaaaaatataacgggcactctacaaaacaagcatacaatttaatagattcatttcttgtaaagtgaaacttcaatcagtggggggggggcatcccccacctaatctcttttcttacgttgagttttaaggtgtgggtcttactgcccatgcgtgataaaaacaatcttatacaggagactcaaaatgacgctgacattactcttacttgttttcatactcattgcctttatctcagcgctaactatcatttttaaaaccgtaaaaaaagggctatttttcaaccgcccctacttacaatctattatcgtttgccttttattttttactaattggatcttatatgtaacaactttttattcgttacttcccgagaaaattagtgagttcctattcctacccatttggtttttcctttgtattttaggttttataactttctggcgtgaatggggaaataatcgtgtattctccatatgtatcggttttctttccttgactagttttttatttggattattgttgttagttctttccgggatgtaatagaagaaggaagaaaagccaactttcaacttttcttccttctatgtttacctttagttttcactgtcactgattcacaaggtgtataatatatttgaggtgtcgccttatcaacaaacatcataaacgtaataaagccgataataaagaaaataaataacgttaacaaaattgctcctatcgttaaaagtatcataacaccacccctatatttttcatgttattacacttttcgctatgatatgagtgtaatcctttttagaaaaggaaacgtaacaaaataatcacaatcactcccgttaatactgtacctaataaactacgagtatatatcgctacaagaaatgttggaattgctgcaataagataatcccactgcatcgtttcatgcataaataaaacttgtgctaaaagcgctgctaatatcgcaattggtatgtaatttaaccattttaaaccccagtcaggaatttgtagtttgctaaatacgagtagaggtaaaatacgtggcacgattgtaacagctcctgctgctagtaaaagtaataatacatctaatctcatttccatttttcaatcaacactccaatcgtcgcagctagtaaggttgcgataataaccgctatactatctggcataaataggtgtgaaacgtatgcgataataatcgctacaattgcaacacttaaatgaattgctagtttcggtttactacttatgagctgaagaacaaataatccgataaacatcgctggtaatgcataatccatgccgtatgtatgtggatctggtatccactcaccaaatagcccgccaatgatagtggcaagaatccaatttaaatacgctgttacattaagccctatcatccatctttcacctaaatatcctttttgcgcagcatgctgcactgcaacgccgaaagtttcatctgtaatttgcgaaccgatgattaggtttttaaatagaggaattttcgtaaagtacggtgcaagtgcagcactcataagaaggtggcgcaagttaacaaaaaatacagtaaaaataattgcggaagcaggagcaccggctgcatacataccagctaatataaattgggcagaacctgcataaattaaagtggacataaatgcaatttcaatgatggagaaaccagctgtttttgcaattacaccagctgctataccgatgctcaagtaaccaaatacagttggtaaacaatcttttactccttgctgaaatgtatcgtcactctgcaaagctacatgtgcctgagctttactcatctctatcatcctccattccttctaaagttcgttttcctgttacgacatgaactaaatctatattttcacgccataacgtatctaacttatcagctccaaattcctttgtgatttcttcaaccataatatcgtgccgcacatactctgtagcaacgagaactagcgctgggtcatacgttgtaacggcccatgaagtgctatcatttgagaagttcgcaattaatacttcctctccatcacgagcaataacagttaaatgaccacccattctcttttcaacaacgtggggcgtcatataattatgatgaaacgtcgctcctatttttgtttctggagctccaaataagattgaaaatatatgtacgccttcctcttccttttgatgaatgtatggctcaatttcatgcacttgttcttcccatacagaaatccataattcttcctttgccctattaattatattgcatatttcttttaaaacacgatcatttgagcgaatatgcgaaattacatctatttgtcgctcttgttctaaacaatttaatttctcatctaaaaattcaaaggacttttcaaagtcttttcgcattcgattcattaattcggtagctggtactggtacatatttaactggttcagaaggtacaatatgcaccgctcctttatccattaacttaccgagtacctcgtaaatcatagaacgaggtactcctgtttgtttactcacttcatagcctgttactggagaatgttttaacaatccaatatacgctttacattcatattgggaaaatcccaacttttgtaattcctttataatttcatccatcggtaacccctcacaatctaaatcgctcttacttcaaaacgacgattttgcttccctttactttttactttatcaataacaagtgttcctatttcactcgtatttttcacatgtgtgcctccacaagcttgttcgtctaaattttcaattgtaacaatgcggatttcttggatagtagttggcaggagatttattgctgttttaatcattcctacagcattttctgcttcttcgcggctcatataacgagtggaaatttctttattttgcttaataagtttattcacttcctcaacaatttcttctacttccacgctcgataactcttgtaactcattaaaatcgatacgtgctttatcaggataaatttgatttccggtgcataaagctccatacttttcataaacaacagctccgataagatgcagtaaagagtgatgacgcattaaattatgacgtctttcccaatttatctctaatttaactggacctaactttacttgtgcttcgtcttttatatagtgaactatttctccttgctccttctttactttttcaacttcaaatacagacccatcttgtacaatgacacccgtatcacattcctgtcctccaccagttggataaaaaattgtttcttttacaaatactttattcccttctactcttatcacttctgtttcgcaactcgttttgtatgcatcttctaaatataatgccgttgtcatactctcacctctttagtagttatagttatacctactaatataaaaaagaagctctgcaaagtcaattgataattctgaaatttaaaattaataaaagactcctttattaggagtccactatctcaatatttcattcgcttctttttcataaattttatcaaatgacgtcataacgcgctgtgatgcttgaatcatcttttgatctgtcataagatctgccatctctttcgtcatatcaacatttgaattttctagcatatgattttttactattcctgttccgttcggtaaattagcaatgtttccttctgctagtgtaaagcttttgttttcacgttgcacgagacgtgcattcgtttcggcatctactgtttttgtttgcaaacgagcaatattattttgtgttacctcatcatataatgtaccatctgcttgtacagcaacctttgctccttctggaatacgaatacgctcattattctctcccattacgaaagcaccagatgatgtttgtaaataacgatcactatttaatgtgaaactaccatctctcgttaaaaacgtttcatcatttttagaagtaacgaaaaatgatgttgtgccggccgcgccgtcatctaaaaagaaatctgtagcgctatttgtcatttgtatatttccttgtactaaattcacatgcgttgcagctggtactacagcgtaatcgaccgaaccgatatttgttaccgccccatctccgcggcgatatgtgtcttgtacatcaaatactttagacgtcatattttctgctttaaatcctgtcgtttgagcatttgcaacgttattcgaatgaacattaatgcgctgcatgtaattcatcatgcccatagaacctatataaagaccgttcatattcgtttgaataaggcaagcgccttattcttcacctcttttctacgatgtttgtaacatttgtttcgctaaatgttcagctgtagcgatatgtatatttttctttatgtcttggccatctgtcattaatacaataggagctgatgatactgctggaattttcaacaattcgccactacttgctgtttcatcaaatttcgtaaacacaataccatctatatgaatatctttaaagtttgtaataatttcaatcatatctttacttttcattgaagctgataacgttaaacaaatataatctggttctacttgtcccatcgtttcaatcatttcttccactgtttctgacgtacgataatttttccctgctgtatcaattaaaatataatcgacgcgtgcttcttctttaaaatacgtaagcgctcttgtcattgcagcttcatcacgcacagcaattacttcagatccaattgtctttacgttatcttgcaattgctgtactgttcctatgcgcgaatgatctgtcgttataaaaccaactgtttttttcttaccgtgaaattgccatgccattttcgcgagtgtcgtcgttttaccaacgccagttggaccgattaatgcaattgtttgtacttctttttcaaagacgttttccgtattgaaatgagatttcatatcttccaatatgtacctgataacttcttcttccgtaatcatcgttgcattttcaaactttatttttaacttttcagcatatgcatgaatgaaatattgttccacatcgttttgttctagcatccgaattactttttgaataataaacggtacagattcttgattttctttctttggaactacttcttctttctttactggaacgacttgtttcacaacttttttctttttcgttactttcgttacttccgtttctttcatcggtttcacaacgacgattcctttttcaaacagctttaatagtttctctttttttcttgcccattcttcactatttcctgtttgcatcgccgcgtatgacatagaagtcgttacgttttctaaattgtgcagtactgattgaattccattcgccttcacaatttgttctgaaggatcattcacaacatccattaactgttcatgaaattgagctgtaccttcattcacttcttcctgtttttcttctggaaaagcaactaacatttcataatcctttttccaaaaaaacggtatatttcgttttacactttcatcgacaacataataataatctgtaccatattggtcaaataactttcgatacaattcatttttcgaagctgcttttattcgcattaacgcttctttcttttctgtactttccattacttcaccccctactattcaatataggcaatttgatccacaacaatttctggtgctaattcactaatacaaagtacttgtgcttccacttgataacgttctagcagtcttacaatcgcaaatctaaaatcttttctacgtgttaataacactggttctcttcccattaaacgtgcttgcttaaagacgcgctgcacttgctcaacgacacgtgtttctaaatctaaatcccagtttaataagtaaccttgatatgaattattcacaacatccgcatctaactcgattgaatcagagaagagcgctgcatatatttttccgtccggatttttcgcattttcacaaataacttttgaaatacattcacgaacaaatgatgttacaccatccacgtggttttgataaatttctttgccgtcaataataccttcaataattgttggtaaatcacgaatagaaataccttcttttagaagttgtttaataacattttgaacaagtgataaatcaatttcttttttcttaatctcttctaatagaacgccattatcattttcaagcgagttaattaagtcttttacatgttggcgctgaattaattcatgaagattacgtctaacgacaacatctaaatgtgtaattaatatgctaagtggctctaaaacttgatagcctttcatttgtgcatcttgcaccatatgctctaaaatccaatatccatcttcaccgaaaattggatctttcgctggctctgcatctaaatcagccattacgtttggtgttttcagtgctaataaataacctgattttaaaacaccttcagccgccttcgcacctttaattcgaataatgtaacgtccgcgtggcctaaagctcgtattatctttaaagttaattccaggaacgttaataccaaggtcagtaataattgacttcctcataagaacaactttatcacgcgctgtttccccgttaattttttgctttacaagtgctgctaaatctaaaccgagttctactataattggatatttatccgtaaatactccgaatgaatcttccacttgttgcagttgttcatcttcgccttggatcatttctatttctttttgaagctcgtcttctttttctttctttattcgatttttattacgaattcctaagaagataattgttccgccaacgagtgcgaatggtagaaacggtagcggagtaaaaatacccattgcgataaataaaccaccgagcgcatatacaacgacttcatgcgctaataactctttaaagataccttctgttactgtatccggtgaaccgtcaaatacacgcgttacgataatacctgttgaaattgcaagcattaacgaaccgatttggtttacgattccgtcaccgacagttaactgtgtataatgaagagccgcatccgcaaagctcatcccttgctgcatcattccgacaattaaaccgaaaataatgtttacgaataaaatgacaatcccgaaaataacgtcccctttaatgaactttccggcaccatccatcgccccgtaaaactctgtttccatatttaatttttttcgttttgcttgtgcatctttttctgaaataatacgctggtttaaatcagcatcgatagacatttgtttccctggtaaagaatcaagtgtaaaacgagctgcaacttcagctgtacgagacgcaccgtttgcaacgataaactggaatatgattaatactgtaaaaataacgataccaattaataagtttccgccaattacgaactggccaaactcttcaataacatgacctgcatttccatctgtcaaaatcgctcgcgtcgtcgaaacgttaatcgatacgcggaaaatcccgattaataacaacatcgttggaaatgactttaattcatcccactcgttaatacttgtcgctcgcatataaataagcactgacatacttagtagaaaaacgataatgatatcaagtataaatggtggaagtggaattaagagcgccactacgaatgacgctgctaaaaagatagaaaaataggttcttgcagaatctatcttaaacaaagagatctcctccaaacgcgctattatacttcaagttcattcgtctgaattaaatagcgcataacttcaattacagctacatataaatcttctggaatcgtctcatcttcctcgacttgataatataaagaacgagcaagcggacggttttccaccattggtatttcttgttcacgggcaagcgttcgtatatataatgcgagctcatcttccccttttgcaacgacaattggtgctgcatcaacgtgtttattgtaacgaagtacgaccgaaatatgagtcgggttgtttacaataaacgttgcgccatccatcttcttcgcaattgttccttgcaagattgcatgcataaagttttttcgtttccctttaacttgcgggtccccttcattatctttatgctcttgtttcacttcttcttttttcatcttaatatcttgctcgtactcccatttttgataaatgaaatcaataatagaaagaacgattaaaataattaaaattgctaagaaaataaatttaatttccctaataatttcagtaagggatgcagtccagttaaatccaatcatactgacaattttctctaaattctttttaaagagaacgtaagcgacgtaaccgattaatcccatataaaatagtgatttcaaaatatctactaaacttttacgactaaacagtctcgtaaaatagtttttcggattaatacgtgacgctttcggtttaatgactttagaagaaaataggaagccgacttgaatcatataattgaataaatgaaaagcgtatacgagtattaatatcggagccgatactttcagtaataaaatccccattaaataaaaatactcggttgaatctgtattttttccaatttgatcaaacagcaccgctacggaatttgcaatctcataccctagccaatctccgaagaaataaacgacaactgctaatacgagaatggaaaataaattatttaaatctttactccgggcaatgttcccttcttcacgcgattttttacgcttctgcggggtggccttttctgttttattatcctttgccatgcgcgtccccctacttcgttaagaaaaagttaaatagtttcgtatactcttcaagtaatacatccgtcatatttttaaacacataaccgagcatcggtacactcatcgcaataaacaaaatcccacatgtaattttaattacgtatgcattcataaaaacgtttaattgcggagcgttttttgcaattaaaattagaacaaagttaatgatgaataaacttcccataagcggaagagcaatttcaaccgctgatgtgatcgcaaataatagcgttgcgagtagactatctaagaaactagtcgtcaacaattttgaaatcgcctctgtatattgaaacgactttaaaatcgtggcaacgaaataattaatgccgccaagtgaaataaaaataatgagaaaaaatatatcaaaaatggttgatagtaaagtagactgtgagcccgcatttacatcaaacaaacttgcttgtgataaaccgatatcaaagtctaaaatatgcccggccattttcggaatgttccacagcatttctacaatttttgaaagtgataatccaattacaatttgcgttcctgcataagctgcaacgtcccaaactgtcttgatgtgagagacatccacttgatcagccactgtaattgaaagagcaagtccaactgtaaccttcgccattgctggaatggatcgtcctgagaaaaacggtaaaaaatataaaaatgaagtaatgcggcaaaacgcaaaaaacgttgccgcccataattccatattcatttcagttcacctatcttagtacgaacgcaatagcgatgggattttatcaaataaatctaaaataagtgtcgttaactcttggaacatccacggacctaaaatgataataacgaggacaatactcgccattttcggtaaaaacgtcagcgtttgctcttgaatttgcatcatcgccataatgacagcgatgataataacgacaatcatacttacgccggcaaccggcattaaaatcataacccctttataaaaaaaggtttgaaaaatatctataattggtgacgtattcatttatatgactcctatcacatagcatcaaacgcttcaggcgaccgttttaaacataatgtcgacgatttttgtatatccacctaaatatacgaaaacgagtattttaaacggtaaacttaaaatcatcggcggtaccatcatcatcccgaggtacattaaaagtgtactaataatcaaatctataaatacaaacgctaaataaatgaacatccctgttagtaaacctttttgaatttgcgttaacgtaaaggatggtacgagcgtaaatagtgaaagatctttcaaatctttcggcaactcttctccgcgtactttcagcatcatttttaaatcatgcttatacgtatgctttgacatatattctttcataataggagctgtcgtttccgcagcttgacttactgttattttctctttcgtcatcggatcccacacatcactcttcagttgcccgagtacaggctgcatcgtaaagagtgataaaaataatgcaagtccaacaagcacttggtttggtggtaaattcattaccccaagtccttgacgtgtaatccctagaacgatcataaaataagtaaaatgtgtaaataatagaacgatagaagaagataatgataaaagggtaacgagcgcaaatagttgtacacttgaattactcgtaaactcttttccattttcgaaattaataaaaccgttcggggctgcatacgctggatttacaaaaataattgaaaaaacgatagaaaatacgaaaataacggctaataatgataactgtttctttattctcatgatggatcctctacttttttcgtttcactcttcaccgcgtcttctagtgcttgttgaaactgatttcctgttccggttaattgcacagactgcacaccgttattactaataacagtgaacacttgctttccgtccacttcaaataaaaaggcactcgtttgatgatttaaataaacgccgtcttttacttgtatatggccattttcaccctgcttaaaaaactgctgtttgcgcgtctttttcgtcatataatatgcaccgtagccgagcgcaccaaacagtaaaacgacttgaaataaggtcgtcatatacgacatatgactcctcctctactctttatcttgcatttgactttgcgctttcataagcgccgcttgtttcttatcagcttcaatttcagaaatgataataccgaatttctcgtccattacgattgcttcaccgatgccgactttcatattacttaaatacacatctactttatgtcctaagtttttctctacttcaagaacatcgccaacttttaactgctttacatcaccaagtgtaatagatgactttccaagctttacaccaagttcaatcgaaatatctgaaacagtatcaatatgtgctttacctgcttcatttcgctttcctgcaaaatcttctaatcccattaatgacacgggagatacttcatgcttcatatggatcctcctactctacaaaacttttaaataggagcgccttacgcgttccatcttttccaataaaacaattaaatttatgctttccatctacataaccaagtaattcatccgaaactttcgtatgaagcggaattatatcgccttcttcaatttgttcaatctcactcattgtcattttctgctcaccaattgcaacgtgaacaggtttgtacacttgatttactttcatttccacttcagacatatactttttacgtttatctgaagaatgttcgacaatattttcagacgttaacttatccataatttcttcaacagataagaatggaattccgatacgcaccgtcgtattccaaaaatctgttttcatatttacgttaagtaatgaaatgatatcactcgctgtcgtaatctttaatgcattcggatctgtttctgtcgttacaaatttcggttcaatcgcaacaacactttcaaatgattgctctaaatttttacaaagaagcaagaatatattatcaagcgttaaaaactcaaacgctgttaacggtctgcgcatcgtaaagttacgcttactatctccgccaagccaacattcatgaatataaataacgaatgctaaatcaatctcaataacaatttctccaagctctggtaaaccgagatcaattacgcaatataaataataatctttcggcattttctccacatattcactcgtaaatggaacttgctcaactgttgaaggctctagttcaattggaatacgcatacgcgctgataacgtctgtgacgtctgttttccaaaagtagaagcaatcgcttgcaaactacgtaaatgctcaacaccgaacttctctggtctattaaaatcatactcttgaaatttctcttgctttcctgcttcttgtgcgaaagctggcatttcctcgccttcatttaccgccttcagcagggcatcaatttgctcttggcttaatttttcgccactcatgacaatccccttccctaccttttcaattcaacgatttcaacgtacatttttccattcttcgttaaaatctttccggttccaatctcttcattctcaagcataagacgcaccgtatttttcgttgaattttcaagacgatacaatgtacctttcgtaatatgaagcagatcttcaattttctttttcgtatttccgatttcaaaataaattgttaacggaatatcatcttgtaatttcaaatctagccaactcccatatcatgttcacgaaaatttcatgttctctctatatatgaaacttcttattttgaaacgtcgatatttaatatttttttaatatatccttgcgtttctttaaatggcggtacgcctccgtactttctcacattaccaggaccagcattgtaagaagcaagtgccaatactaagtcaccgttatttttctttaaataaccacttaactctttcacgccaccttcaatactttcagctggtgaaaagggattcttcacacccatctccttcacattcgctggcataagctgcataagtcccatcgcaccggcatgtgacaccgttttcggattaaaattagactctacttcaatcattttttgaattaacgttttcggaattccatatgtacgacttacacgatcaataatatcctcatacttcccttcattggaagaacgtattttttgaatattatacttcttcgttaatccccacgtatcagcagcctcatttttcgtttctgggaaacgtcgttcaaactctttttgcgcaacttgcacttcatctgctttcttcgtttcacccttttcttcgggcttactcgcttcatctacttttttcgtttcacccttttcttcgggcttactcgcttcatctactttattaatagattgttccggcttattaacaaccgtttctattttcgtagattgttccggctgactcatatcttctatttttgccggctgcgtagtagccttcgtctccctcgcaggttcactctgcaacttctcttgaaaacgactactaacaaatgcttgtggactacttagcttttgctgaatttgtccttttttatatgcaagcacttcttttactatatttccaactaacataatatcaccttttcggtaaacaaagataatctaatattagagtttttttttaaagtttgcaataatccttttgataatattgtaataaaaaaatgaacaaataggaaattatcatttttttatattcattaattacaattattcgttgacacgatatacaccaaggattacaattaatctcgaaattgatttttttgcatatttacgtttaacaattaacagaaaaatcaatataaaaaaatgggggttcttaacatgagaattaatacaaatattaatagcatgcgtactcaagagtacatgcgacaaaaccaagacaaaatgaacacttctatgaaccgtttatctagcggtaaatcaatcaacagtgcagctgacgatgcggctggtttagctattgctactcgtatgcgtgcaaaagaaggcggattaaatgttggggctcgtaacacacaagacgctatgtctgctttacgtactggtgacgctgcattaggttatacaacgatagaggcattaatatcgctacaataatcgaaaaaaagtcttgataaaatggtgaaatggaatccgtttgcttcaataccgaagcaatacgaggaaatacatagaatgtttgaggaacaatataaagtacctaaaccttttttaacacaagatactatggaacgaatagaaagagcgttaatgcaatcttttcacgaggaagaagaaatacatatctcatactatcgtgatggaatggtgcaagacatgtacataaatgtattacatattgaaccgatgacgaaaactatatattgtacagatgcctttggtttgaatactaagtttaagtttgatgaattggtgaatataaattaaaagaagccgcccgacaggactgaagtgcaccccaattgttagacacagcctaacaattggggtgcacttcacatatataggtggcttttgtacgacaaaaaaaagagctctgctatacagcagagcaaaagaaaaatatataaccctataaaaataatacaaattattgatactttcaaaagacgaaatttaaatttccatcacaataatagctatgtttaagtatgaaacattctaccttcactatagctatgaatattcttattttagaattccatagtatccaaatagctctttgagagatacctcaataccgaacttcttcaaagaatcttttctttgttcaaagagaagttctaaaacttttttcttatctttgtctcttccataatgaatcaacctatgacagttcggacatatactaactatatttccaacaacatctaaactattttcaaaatcatgttgcattcttaacggtattagatgatgggcctccatataattttttcggctggcttccgatacaaatgtttcatgtgtgtcatctatttcacatttaaattctgcctgtttaatagcttgtttagcttttttcggatcacgaggccatacttccctaccagattccattttagttttttttcgattttccggtttctcttcttctgcaatctttactttactaaaatccgaatcaatattagcctgatacatatcttcctcttgctcatcctcagaaagaataaagctctcattcaacgctttaataatattatcaatagatttatattttgctaattttattgaatcaatatatgaatatataaatttaaaagattaaaataaaaataagtacacatgttttattaggaggtatatgtatgtccaacagcacttcatggctagatgaaattatagcaatattaaccgaactagatggagcaggaacactgaatcaaattaaaacaaaggttatggagcgtaataaaattgacttgaatagataccaacacgaacagtctatagctgcaagaattagaaagaccatttatcaggtaaactattataaaaacgttcaatggccgctactaaaactaaatcttctaaatgagcagttttaaggttgtttatttttaaaaacatcaaaaatgccaaatcccttatatcacaaaggatttggcatttttaagtatctagaacacgcgctaaatttaaggagaaattaacagacatgagtccggtataatgccgtgtccacacccaaggatcggttacataaaatagcgtatctaacctgggaagtctattggcctttttcccttatagtaacgctctcttctactaagaccttttctttctagggcctacaattaatttaatcgctgttctttcttcattattgatagaaatctcttgaaacgctggaacaaaagctaagtcaataccacttggagcgacgaaccctcttgcaatcgcaattgctttaatcgcttgatttatagctccagccccaatcgcttgaatttccacattaccacttgttcttagtactcctgctattgcacctgcgactgaatttgggcttgattttgaagatacctttaatatattttccatgtaagttgctccctctattatttaatctctctttcgttacaattttaaatattttagcgtatctttaattactattcacaccaaaaacaaacgatgcttcatatgtatattattctatattttctgactttttcctgctcagctacgcaaataaaaaataaactgaataacctaatataaatatagctaaatattataacttcaccaaatgataacatccatacagctaaaggtaatatttctgttttgtcagactaaataaatatagtaaagtgaaattttaatgagtgggggtttaattcatcccccacctaacttctttgctttcgctgaattttgagatgggagtcttactgctcggaaaatagcgggataaacgtttcctcgttacttcaatctatttagaaattccatttatttttctatcaaattataaaccttatcatcttcaaaaggtgttacaggtaatacccaaatactacacttcatcatttgaccactttatattccaaatctatttccttttatagtacaagcatacacgccaattgtgattcatcttcataaactactatgtggtttaaatttattaagaataggaggtaatattttgggttcatactatcattcttcaaactcgtataaaaaatgctcatgcaaatcttcttccagttcaaataaaaaatgttcatgtgaccattcacataaacgaagctgtcctgcatacggaactttttggcaaactgaatttataactgttccttttggcgatccttttccatttaatcacgttggacctttagcaggaggtgtttccttactaaatcctactactatacactttagacaagctggtgattatagagtttcgttcatttccagtattaatactactttaaatcctgtatttccacatatcccagtcataactatatttttaaataacaatccacttgctaatagtcaaggtgacttcgctattcaaatgaatacttcatcaaataacgaatgtcttcaactcgttggcgaaacaattgttacagtgcctgctaattcaactcttcaacttagaaataatagtggttttaatcgtcaaagtattgtaacttgtgacaatggtataaattcagttgaattaacagttacaaaactaagttaaaattatttcttcacattcagatgctatttcagcatctttttttattgaataacagttttttcaacttttattatctctccccacataaaaaagtgcagaattctttctaacacaagatttctgcactttttattatacttatttattcttccttatttctctacataaaccgacttaacaatcgtacgattatatggttttccttctttattcatcccttttatatccatcgtaacgttgtatactcccggttgttttatatctttcaaagcacctgtaaatgtattcgtattaacattttgtaattcattaaattcagagactaacttaccttctttattaacgactcttactgttatggaaagatcccctttcatttcaggtgctacaggtgattttttcagtttatactcaggtttatttattttaacttttgtaggcattcgaagaacaaatggtgcgtcatccttgtaatcgcttacaactaaatatgcatctttcgactgcttcgccatcattttgattttccattcgcctacttccaatttatcaaacttaaatgttctaattgtcgccctattaaagaaagattcgccttcaccagtagttatagcgctatctttatttgcatagatttttccttttggagataccatttgtacttctacatcagaagaagcagttagtacagaaacgattccttcagcctttttatcaacagaaatactttgctctatccactgattttgtggtaattcgcctcctaaaatattttgatttgaagttgtatttaattgttctagatcttcatttgaactagtgctggatgctactaaagctggtaatcccacatttgtcgtacgtaaatatggttcaattcgtgcaaaaacagctgatccttttcttatattgtcatgatcaaatctggaatctgtaaataaatgtgtaccgtacgatagcttcgcactccattcatttactagtccatcatttgaaccgtacgatgataaatataacccgcccatagataatgcagaaaatgttggcccccagctagttccagtagccgtatagtaacggtttaatttagctgctgggttgttatctattattgaacgaaactttgccatttcacctatttgtaacgaatacgtaccatcatctttttgacctaatatagaagcaagccaacctgcccaccaactatatgacaaatctgctaaatttgagccgtgatgcggtgtagcaagtgtaataacatttccaacaaatcgattcgcaccatattcaactaatgcggcttgtgtatcaataccacctttactatgcgctacaatattaacttttttaccgaaataattatatatttcttcaagtttttgtgctaacaattttccgttatcccactgactagccgaacctttccctgcagcatcatacaattgtataaacactgtttgataacctgcttttaaagcataatcatacatatcatttatatcatgatatactgtctttccataccaactatcagcattaccatttcttccttgtacaaagagaattggcggtttattctcatcataattagcaggtttttggcctaaaaaccattctccaggtgtgaatacttctgtatcaggaaacccctttccaagctcttttacaacttctgcctgtacatttgtgctaatcgttggagccatgataaaaaatacaattagtaaggccacacatcttctcatcagtcgcatattactccccctatttttttgaaagaaggtgttctttataatattttatattttcccttccttaataatagctaatcttttatttttagaaggttactagttgtataccctcttccttaactctcgttattctctttgtttctacctcttccttttgatagaatacgacaaaaaagtttctcaataattgttaacttcgctacacccagatattttttaaatcattattgtttatataaagcatacaaatcttgaaaaaattttagtgaaaaaacattttattactagttagttatttaaaaatataataaagatatgtactttcttttcattaaatacaaactaattttaaaggagcttgtattataagactttcctacgattaaaaattaaactgaaatttccgaatagaaaatcatatttccagaaacatatattatgataatttccgcacacttgaattaactttttagaagtactaacctatcggtgagcagaagaaaattctgtaaaaagaaaggagaatactttatgatgaccaaattacaaaaggagttttttaaacgcttagaaattcctgcaaaagaaataacacttgatgatttagatgaaattctcttaaaaatgggaatgatcctcccctatgaaaatcttgatattatggctggtactattaaaaatatctcaaaagataacttaatagaaaagttacttattcaaaaacgaggtggactttgttatgaattaaactccctattgtattattttttaattgattgtgggtttcaagtatacaaagtagccggtactgtttatgacctttacgataataaatggaaacccgatgatggtcatgtcattatcatattaagtcatgaggataaagattatgttgtggatgcaggttatgcatctcatctccctttacatccagtcccttttaacggagaagtcatctcctctcaaacaggagaatatcgaattcgtaagcgaaatactcgaaaaggtacgcatattttagaaatgagaaaaggagctaacggggaatctacaagtttcttacaatctgaaccttcaaacgaatggaaaataggctatgctttcactgtagatccaatagatgagaaaaaagtgaataagattcaaaaagtgattgtagagcataaagaatctccttttaataaaggagctatcacttgtaaattaactacttatggtcacatatcattaacaaataaaaattatacagaaacctttaaaggcaccaaaaataaacgaccaatagaatctaaagattatgctcgcattcttcgtgactcttttggaataacgcaagagaaatatgtaggaaaaacactagaaagaggctagttgactacaagtatttcataataaagcagattctatatttagaatctgctttattttatattttgttataaattaatttaattttgttgttaccctttaattttcaattatatactcatcatcatatttatcgtattgtagccctttccctatctttgactccgtaacttgatctcttaaaaacggtgcagcatccattttactagttgcaatttcaattccatattttttcgttaaatgagctaactctattaaaaaccactctcttcgcaatgtaactggaatatccaatgtttttcttttcatatataatagcacctcttttattttcatagcttaaaaatatcactggatgcacttattaaaactacctttcaccgctaacatccaatgaaacattatagtatatgcatgtccatttcaaacgtgctatcacaaatatgacatttaagtttacataattatattatgtaatagtaggaaaggaaggcatgtcccttcctcttctactatagatttaaattaagaacatcttggtacacctaaagctaaaaataaacctgctactcccgcagtaatcggtacttttaacgtaataacatcatctaccttcgttactaaaaagtaagcattaccttcttgtaatatacaagttaccaacaattgaaattccattcaaatctcctcctttcaattgatatactataatttatgaaatctctttcaaaaagtaataggaaatatatccatttttccttatatataaaataaatgtttatgagtctattaaaaatattaattttctaaatttatacaaaacgtgtaatatccaataaattcctatataatcaataagaagaatcttacaaatagaggtatgaaaatgtcgattttaagtaatattggtgcagctttattttttattgcttttattcttttaatcttatgtatcatttcattctttaagaaaaatggaaaagcaaaacaatatggacgtcctaccgttattctttttatgatttctattatattaataacggccggtacaacaaaatcggaacaccccgtcgtcgagtttttttctactttaagtttcattctatttatattcttccttgttctagcaatcttatctgttattaagaaaacaggtgtagcgaaaaaacaatttattattacagctgtattatttgtcatttttgttgtgttattaggtatttcagctccttcttctgaaaaaacgacagcaactagtacaaaagttgcctctaataatgaagagccaaaagatagcgaacagaaaaaagagctagaaaagaaagaggcggacgaaaaaactcaaaagcaagaagatgagaagcgtctagccgaagaacaagctcgtaagcaagaggatgaaaaacgtcaggctgatgaacaagctcgtaaacaacaagaagaacaaaaacgtcaggctgatgaacaagctcgtaaacaacaagaagaacaaaaacgtcaggctgatgaacaagctcgtaaacaacaagaagaacaaaaacgtcaggctgatgaacaagctcgtaaacaacaagaagaacaaaaacgtcaggctgatgaacaagctcgtaaacaacaagaagaacaaaaacgtcaggctgatgaacaagctcgtaaacaacaagaagaacaaaaagcacagcaagctcaaacacaaccagctaatggtaatactgatagtgcatactacaaaaattgtgctgcagttagagcagctgggaaagctcctttacataaagggcaaccaggttatagctctcatcttgatcgtgatggcgatggaattgcatgtgaaaaatagtaataaaaaagaagcttttactaagcttcttttttattaacgtaaaatattaccacttattactttcccccttattttaataacattcttcttattattctcaaaaacgacacagaataagtgatttcaatcactacatagattttaatttatcgctattcttaattcagatattacattaaaattttatggaggcattcatatggaacatacatttactgaaacttcaattgttggtgagattgttacacaatttccgaaagctagtgatctttttaaatcatatagaatagatttttgttgtggcggtaataagccacttattgatgcaattcatgaaagaaatttatcagctactgaagtgcttacagagttaaatacgctttatcataatacgaaacgattaaatgaatcggaaattgattggaaaaatgcttcttatcgtgaattgattgattatgtcataaataagcatcaccgctatttaaatgaagaattaccacagttaagtccatatgtgacaaaagtattacgtgttcatggggcaagtcagcctcattttgctcaaattcatgagctatttcatgaacttagaatggaattagaacagcatttaattaaagaagaaatggaagattttccattaattttagaatttgaacaaaatccaactaatgaaaactatgctaagttacgtaaagtagtaaatgaactagaaaatgagcacaatcatgctggaaatattataaaagaacttcgtaaagtgacaaatgactttactcctccagaaggtgcttgcggtacttatcgacttgtttaccaacgcctcgaagcgctagagtctgatttatttgagcatattcatttagaaaataatattttatttccgcgtgccattacgaaagcataaatcaagtgcaggacatgagtgtaaatacttatgtcctgctttttcgtttcgcgaaaaatattcacatccccttcacataaaaccgaattttaacaatttgtgaatcattataaagatgtgataaatatcacatctcccccttatttgattttctataataaaaatataatcctttgttcaatatttcacataaaaaggggaaacgaaaatgaaaaaacgtttagttatgatcggaaatggtatggctggcattcgctgtatggaagaaatcttaaaacatgatagtgattcatatgagattactatttttggagatgaaccgcatccaaactacaaccgcattatgctctctcatgttttacaaggcaaaacaaatatacaagatatcattatgaatgaatacagttggtatgaagaaaacgaaataactttgtatacgaatgaaagagttcaaagtattaaccgagaagaaaaaattattattacagaaaagaagcatactcttacatacgacaagctcattatcgcaacaggttctagtgcttttattttacctgttgaaggttccgcactttctggtgtaacagggtttcgaactattgaagatacacaatttatgatagataccgctaaagaaaagaaaaaggccgttgtcattggtggcgggttactcggtttagaagccgcaagaggtctaattgatttaggaatggacgtacatgttgttcatttaatgcctagcttaatggagcaacaactagatacgaaagcagctgctcttctgcgtgaagatttagaagcacaaggcatgaagtttttaatggaaaagaaaactgtaaaaattcttggtacagaccatgttgagggcattcaatttgaagacggtgaagttgtagattgtgatttaatcgtaatggctgtcggaatacggccaaatacgcaaatagcaaaagatgctggtctaattgtaaatcgcggtattgtagtcaatgactatatgctaacaaatgatgagtccatttatgcagttggagaatgtgcagagcatgacggtatcgcatatggacttgttgctcctctttatgaacaaggtgcgatattagcaaaacatataacaaatttacaaactgatggatattcgggcagtatcgtcggtacacacttaaaagttgctggttgtgatttattctctgctggccaaatttatgaagatgatcaaacgaaagcaatatccatctttaatgaatgtaaacgttcctataaaaaaatattaattcgtgataataaagtcgtcggtatcgttttatacggtgatacagctgacggtacccgcctctttagcatgttaaagaaagaagaagatatacaagaatatacaccagcttccattcttcacaaagctggtgaagaatgtgaacttgacgttgctactatgagtgcggatgacacaatttgcggatgtaatggtgttacgaaaggcacaatcgttcacgccattttagaacaggagttaaagacttttgaagaagttaaagcctgtacgaaagccgcagggtcttgtggtaaatgtcgtccgcttgtagaacaagttttatctcatacacttggagatgcttttgatgcttctgcacagtctaccggtatgtgcggatgtacacctttatcacgtgatgaagtcgtagcggccattcatgagaaaggtttaaaatctccaaaagaagtacgaaacgttcttggttttgtacatgaagatggatgttcgaaatgtcgtcctgctttaaactactatttacgtatggcgattccagaagaatatgaagatgataaatcatcccgtttcgtgaatgaaagaatgaatggtaacatccagcacgatggtaccttctctgttattccacgtatgtacggaggcgttacaacagcagatgatttaatgaaaattgctgaagttgcgaaaaagtacgatgttccacttgtgaaaattacaggtgcgagccgaattggcttatacggtgttaagaaacaagatttacctaacgtatgggctgaattaaatatggcttctggatatgcgtattcaaaatctcttcgtaatgtaaaatcatgtgttggctctcgtttctgccgtttcggtacgaaagattcattaggacttggtatgttgcttgaacaatcattagaaatggtagatacacctcataaaataaagatgggtgtaacgggctgtccgcgtaactgtgcggaagtactgacgaaagattttggcgttgtttgtgtcgaaaatggataccaactttatattggcggaaatggtggtacggaagtacgcgaagctgattttgtaatgattgtccctactgaagatgatgtccttcgcatcgctacagcttacatgcaatattatcgtgaaactggtatttatggagagcgtactgcctactggacagaacgattaggcttcgatcacataaaggaaatactgcaagatgcaaatatggtcactaagttaaatgaacgtttccaaaaagctcgtggcacatataaagaagcatggggacaagcactagaaacgaaatcattaaaagcgatgtatgaagtagaaactgtgaaataaggagctgtgatctatatgatacaaacgaaagaaaaaataaaagttatgcgtgcagaagaccttcctattcaaatcggtaaagaggtacaaatgaaaggtatgtctatcgccctattccgcctttcaaatggcgatattcgagctgtagaaaatcgttgttctcataaaaacgggccattagcggaaggtattgtatctggagaattcgtcttttgtccactacataattggaaaatttcactactaacaggtgaagttcaaaaacctgatgatggttgtattcaaacgtatgaagtagaagttattgacggggatatttatatatacatgtaatttacaaaaggaagcctcccctggcttccttttaaataaaaatagacgaggtgcgaatatgaacggatatgtatatttagttggtgcaggaccaggtgatgaagggcttattacaaaaaaagcgatggagtgcttaaatcgtgcagatatcgtcttatatgaccgcttattaaacccttcctttcttaattatacaaaagaaacatgtgaacttatttattgcggaaaaatgccaaagaatcatactatgcgtcaagaaatgattaacgcacacctccttcaatttgcgaaagaaggaaaaatcgtagtccgcttaaaaggcggagatccatctatttttggccgtgttggtgaagaagcagaaactttagcatcagcaaatattccatatgaaattgtaccaggtattacatctagcatcgccgctagtatctatgcaggtattcccctcacccaccgtgactacagtaatagcgtcactttattaaccggacatgcaaaaggtcctttaaccgaccatggaaaatataattcatctcacaatagcgacacaattgcctactacatgggtatagaaaacttacctacaatttgtgaaaacttactacaagcagaaaaaaaagaagatacgccagtagcagtcattgaatggggtacaactggtaaacagcgcgttgtcacagggacactgtctaccattgtttctattgtcaaaaacgaaaatatttctaatccttctatgacaattattggtgatgtcgtttccttacgggatcagatcgcttggaaagaacgtaaaccattacacgagaaaaaagttttatttgcatctgcaacgaataaaacaagttcaatgaagcaaaagttacaagaagccggtgcagaaatatatcaaattcctactttcaaaaaggtagaatacacattaacacttgaacaaatcaatgaaatttttaacgttaatcgtcttgttttttgttcagctgaaagtgtagaaatattgatgcaatcatgtagtaaacaccaaaaagatattcgttctttacaagcgcaactacaacatatgaacgttgccactcaagaaaaacttatgcaatatgggctactaagtaaacaagcagagttctcttccaatacaacagtttatttaggacgaaacattaaccgaattgctgttattcaagaaaaaattggtgctggttcctatatgatgactcatgagtacacaattgatcatcgcttcgatgaaattcattcacgtatgctttctgaattctcatgggatagcattgtatttgaaggtcgtgcttctattgatacgtttctagcagaaataaaacgccttggctttatcaatattcttactctcccattctcgtataccgacgttccaactttatactatgcaaataaagttgggtttcataacgtagatcatcaattacaagaaactcttatgaagaaagacatggtgagacaatgaaaggaattgtatatgttggacatgggagccggctacaagaaggtaatgaacaattcattcaatttattcaatctgttatgaaagagcgaaacgaaagaattcaaaaaatagcttttctagaactaacgacacctactatttcggatgcagttacagaaacgataatagagggagtaactgaaataatgattgtacctgttttattatttgcagcagctcactacaaacgtgatgttccttttgaaatagaacaactacaaaagaaatatccacaaataacattttcagttgtacctccttttagtacacatccacatatggtggaacttgtagtgaaaagaatacgtgaagctatgccaatgcaaaatagtagtattttactcgtaggacgaggcagtagtgatacacaaccgatacatgagttacaacaaatcggagcagccatcgaacgaaaacttggtatgccagtatcctgttcctttttaacgaaaggaactccctcttttgctgttgagctcaaggatataacatcgactgcgtcccatgtatatgtcatgccataccttctctttaccggattattacttcaaaaaattgaattgcatacaaaaaaatacaatcatgttacgacttgtaactgtcttcagtttgatacatatatgaaactaacattgttagaacgaatggaggaatgcatatatgtataacatgtaccctcttatgtttaatctacaaaataaagtggttgttatcattggtggaggtaaaattgcatatcgaaaagcgtctggattaaaagatacaggcgctttcgtcactgttgtcagcccagaaatttgcgaggaaatgaaggaactttcttatattacttggaagcaaaaagcttttagtaatgatgatattaaagatgctcaccttatttatgcagctacaaatcaacacgctgtaaatatgatggtcaaacaggccgctcatgatttccagtgggttaacgttgtaagtgatggtacagaatcatcttttcacacacctggcgttataagaaataatgaatatgttgtcactatttcaacttctggtaaagatccatcatttacgaagcgtttgaagcaagaactaacatctatattgcctaaacttataaaaaagatttctcgtacacataaattgtaatctatttcttagttaaaatagtaattacctttggacaaacgttttttaggggacgtttgttctttttgttgtagttccgttcttttatttcacaagcaatctatgaagaaaataaatggtgtttgcaacttgtaaacaaataaatttcatgacaagtgtaacattacgagcaactctttctattcagtttttatattggatattcattcaaccaaattagcgcttgttcataatcatcaaaaaactccacggattcttttgtattggattgttgcaaatacttcagtatctctccttcttcaagaagaaatgcaattgccttactatgattcaaaatggtttcattgaagaacttatctttccatactttttgaacagaaaaatgatttggggtatacccttttctatccaccaacaatttgtatttccgaccctcagaaataaattgctgacaaacctgctcaaaatcattaaaccattcatacacatcctctgtattaatctggccaattagatgggtaacaatcaaatctcctgaaactattgtgctgatattctgtttactcaacttttaatcatctcccttagtggcaattatgcataaaattcttacttgacactcccaccccatcgctatcaccctaagctcatataactttaattataagcgagattgtgtcttttttcgcaagtctatatgtaaatactttaaagatttccttaactaatctgccctttaattgaataacttttgacatcttcattttaaaagcacattcttatagaaaataagcgtttattgagagatcaataaaaacatgttgaagcctattactaaaagaaccatcccaaaatactttgggatggttctttttccttattaatgattctttaacatcactaacagcttttcttgactatacatccacactgtaatgattaaacaagcaagtgcgacttctgataatgccataaatccaattgcataatggcctgttagttggaatagtaatgttaaaattaggggcgggaagaaccctcctagtccacctaaagctgaaacgagtccatttacaatacctgcttgttctgagaagtacattggaacgagtttaaagattgtaccattaccaatgcctgcacaaaatgcgactagtaagcaaccaaatgtatacacgttcatactaggcatgaatgataaaataatacctgaaagtgttaaaccgataaatacgaagattaatattttaaatggattaaacttatcgccgagccaaccaccaatcggacgcataattgttgcgagtacgatgaatcctgcagttcgcataccagcatctactttctctaatccgaagtgagatactaaaaagtttggtaagtatactgtaaatgcgacaaatgatccgaatgttaaaaagtaaaagatacataaaaaccaaagtttctcatttttatatacaccttttatttgttccattaatggtgtattcacctttttctccttacgatcacctaataaaaagttcataagtgcaaatgctgcaagtaaaactaaataacattgtactgtcgttctccagccaactgaagttgcgataacaggcgctaaaaatgaagtaattgctgttccggcgttaccgacaccgtaaataccatttacaaaaccatgactctctttcggaaagtattttggtaaagaagttactcctacagagaatacagcaccaccgattcctacaaataatccaccaataattaaatccatcatagaattggcaacactaatataaaagacaggaagtaataatagaataaaactaataaagaataattttcttgctccgaaacgatttgtccaataaccaattggaatgcgaagaacagaacctaaaataacgggtactgctgtgaccatagaaatttgccccgcagttaatgggatatccactttaatataaggcattaatgatgataaaatgacccataccataaaacctataattagattagaagtttgtaaacttaattgaaaattaggacttttcatcctgttccctcctatgtatgcatagttatattcattctctccagcctaatcacgtcgtaacatgattaggtcgaaaagaatcaaccaccacttactggcggaatcatcgccacagtatcaccagtttgaatgacgtcattctcatttgcatactcttcatttatagctaccatgatttcatttgaaatcgctacgttgtatttcttaatgagtaccttctttagttcagcaactgtaatattttcacaatcgatttgtaatgctggcttacttacttcttcttgtaaatgtgcaaataatagtacttcaatcatattctcatctcctcttcaggttcaccatcttcccaaaattctttcttccaaattggaacgatttgttttatacgctccataatatattcgttcgcctcatatgcagctttccggtgtggtgtagaaacagcgacgacaacagcaagatcagaaatttgtaatgtaccaatgcgatgtgtaatggcgacaaatgtcccaggccacctctctcctaattcagtaccaattctctcaagttgtttttctgccattgttttatatgctacatactctaaatgtagcgtacgacgccctttcgtaaattctctaacagtaccaacgaaagtagtaactgcgccacactcacgacgaattactttgtttgtaacttcctcaattgaaataggtgtatcaattacttcataatacgtttgtatcattttgcacctcttatctttgtataagttagtaatctatttttctattatttgtatgatcgaagtggttcttcccacggccactcacttccagcgtttgattctaataacagtacggaaacagttattcctgcttcaaatcctctcgttcctcctggcaggacgataaatgcgttcgcctctgcaagtgaagaaattgcactagatttatctaaaccaactggtatagcttgcaattgactatctacaaattccactctccctcttacaaaacgagtaaacggatttgctttcgaaaagtctttttgtaaaattgcttctgcacgataaatgtgtggatctttcctatgcaaatatgttccaatgactggtcgaacatataactcacatccgacataacaagcagaaggattaccagataaaccaaatagtagttttccttctacctcagctacagttgtcacacttcctggtcgcatcgctattttgttaaaaagtacattagcttgtaacctcttatgaatagcaggtaaatagtcataatctcctaccgaaacgccaccagttgtaattaaaatatcgacttctttcatcgctttttttacagtgttataacacgtctctaaatcgtcagcgaattgcccataatactgtacaactccgccggctcgttcaatttgagcagcaatcatataagagttactatttcgaatcttccctagctttaattgttcatgtacttcaagcagttcgcttcctgttgttacaattccaataaccggctgttttataacatgtacggaactataaccaaacgtagcaagaagcgctgctactccaggattaataacagtcccttttttcacaaggatgctattttggtttacatcttctcctttaaaagaaatgttatcgctagaagagaaagagcgttttaataccatataaatcttttcattttcttcaaatccttccgttagctctaacataacaaccacattacacccttccggaattgcggcacctgtcataatacggacagcttgaaattctttcacttcttctgtaaaaacaaagcctgctccaatttcgccaattacttcaaattgaatggggttactactactcgcttcttttgtatcttccgctcgaatcgcaaacccgtcgtacggagagcgatcaaaatgcggaacatcatgatctgcaataacatcttctccaagtgttctaccgtagctttctataagagaaaccttttccatttcaccttggtaggcatatttcattacacgagcaactgcttctgctactggaattggtatacgtttatctaacattctttttcacctcattttaataaggaaaaaacgatttttctgttcatcctatatatttggcgtataatcgttttgctattttcacatcatttgtcccatgaataaatgccctaccgtctataaataaaacaaaacgatattcatcaactagaaatgatagtaagtaaggcgtttttttgacatgtacacttttttgtaatcgtttttgaatttcggttaaattaagatttctctttattcctgaacggatttgaactgtattccgtccgcataacacttccgttttcatttgcgcttcaaatattaagcttggatacgttcgtgatttcccacaagaaggacatgtacttttcttctgtctatttacttttaatgagagatattgattgttccaaatatcaaatgacaacatcgtccctcttaatgattcataatcacccaccaatattttcatcgcctctgtaacttggtgagcaacgaccatttgtacagctggctgaatgattccggctgtatcgcatgttgcaccgcccataggatgatccattagacagcgaaaacatggtgttttcccaggaagaattgtatacgttacaccgtaactcccaatacatccgccatatatccaaggtatattttctttttgtgaaatgtcatttataagtagacgcgtatcgaaattgtcagtcgcatctaatatgagatccacatcttttgttaactcttctatttctcgcattgtgacatctgttacaactggtacaatttccacttcagaattaatctttcttacatgttctgctgctgcaattgcttttggtttacactgctgcgcatcttcttctgtatataactgctgccgctgtaaattactccattcgacgtagtcacgatcagcaattgtcaatttcccaattcccatcctagcaagtgcttctgcattcgcagctcctagcgcacccgcaccgattaggagcacatgcttttctcttatttttctttgtcccatttcaccaattccagaaaacaacacttgtcttgaataacgctcttgcataagaaatcctcctttcactatccaccaatgtaagacatttcaacttttggacgtttacttgtattctcaactgttctttcatctgaatatcgatctgttctatatcgccatgtatcatttaaaatttttaatagtgatgcatcagaaatattttctcgaagaagcgttcgcaaatccgttcctttcgctccaaataggcatgtgaaaaacttgccgtctgccgaaatacgagctctcgtacaagaaaaacaaaatgactcagaaacagaagtaataaatccaacttctgcattactccctacatatcgatacaatttcgcaacctctccaaaataacgaggctgagcgggctcaattggatatacacgattaattttctctattaattgttccttcgtaatgacttcttcaaaattccatccgtttgtactgcctacatccataaactcaatgaaacggagctgaatttctttttctttaaaataacgagccatatgaagaatttgactatcattcatccctttttttacgaccatatttacctttacttctaatccagcagcatttgctgcttctattcctttcagtacaggttttgtacttacatttcttccgttaatttttttgaagacatggtcctctatcgcatctaaactaatatttacacgttttaatcccgcgtcttttagcgccttagcttgttttgctaaatgaattccgtttgttgtgagtccaatatcttttaagccttctagatttgtaagtcttgcaattaacttcggtaagtctttacgcaataaaggttcaccgccagtaagcctaattttattaactcccatacttataaataatctcgctaacctttctatttcattaaatgttaataaacactcttcctgtaaaaaagcataatcaggtccgaacacttcagcaggcatacaatatgtgcacctaaaattacaacgatcaataactgaaatgcgtaaatcttgaagtggccgctttaaagaatctttcatattctcgtgcatctctatcccttcttttctgctgcaatccttagtaagctttcatttttttatttgccttcattataaaaaagaagctacatattcaatgtgacttttctcacatcactttccccattcaaaaaattttcacaaatccgttcgcattttgttcacatctttagccactcctccttacggtcattgaaatttcaatttatttttaaatagctcttgcattttcatcatacttacactcaaaataggaaatgtattgcttataagaagaaaggtgatcactgtggcaaacagtatgacattatctcaagatttaaaagaattacttgcatctgttgaatataaaatgcagataaaaaaaggtagttttatttttcaagaaggtatggaggcaacagaactctatatcattcactcagggaaagtacaaattagtaaacttagtgctgacggacaagaattaacacttcgaatttgttcggaatatgacattattggagaattaacattgttcacggataatgcaaaatatttattaaactcaaaatgtcttgaagatgttgaagtaggtgtaataaaacgtgaagcgttagaaaaagcattactccaaaaacccgctcttgtatttgaatttatgaaatggattagtgaacatttaagaagaatgcaaacgaagttccgagatttagtattacacggcaaaaaaggtgccctgtactctactcttatacgaatgacaaatagttacggtgtattaaaagaaaatggtattctcatcgatttaccattaacgaatcaagaactcgctaatttctgtgcaacttcacgtgaaagtgtaaatcgaatgttaaatgaattaaaaaagcaaggtacaatttcaattcataaaggaaagattacaatccacgatttacaatttttaaaatgtgaaattgcttgtgaagattgctctgcttctgtttgtagcattgattagcatcttatttagatgctaatcttttttcaatttaaactacttattaacgtttattgcctatgtaaacaaaaacgaggccttccatattagacctcgtttcgttttaaccattagctcctatccgtttacagcagtattattttttcaactcattaggaatacgtcttctgtaaatcacataactacggcttacatatttaattggggcactaaatacatgtacaagtcttgtaaatggccacactgcgaaaagccccatccctgcgagaatgtgaattttaaaccatattggtacttccatcatatattcaactttcggttggaaaataaagagacttcggaaccaagggccaatcgttgtacgataatcaaatccttttgaatcgatatttaaaaatgttgaagaaagtcctgctagcattacgataagtaataaaataagcgcaatataatctccctttgtactcgttgcaatgatacgttttacagttacgcggcggtacgttaatataattaaaccgataatagaagcaacacctgccggaagcccgaaactaattgctactacatggtacacatgctcagaaatacctactgaacggtatacagcttctggaattaaaatccccataacatgaccgccaattacgaacatgatcccaaagtgaaataatagacttccgagtcggagcattttcttttctaatagttcactagattttgatgtccatccaaattgatcatagttgtatctaaaaatatgtccaccgataaagattgcaaaaatgatatagggaaacaatacccaaagaaattgatccatcattttgacaacgctcctttctaatttgtctgtacaccccatgtttcgatagcgagtagcacagacgcaagaattggttcatacatactacccgcttcttttaattgaacgtgtaatgcttgtatattttccgtgtatttactcataattggttcactgtcttgctcatttgcatttgcaaaaaactcaagtaaaagtggtaaatagtcaggtagttctttatctgttacgctaaaacctgattttttataatgttgttttaactctagtaattcaatacctctttctctttgttcaccagtgttcatataagtaagatacatatttgttttcttaccaaaatcaaatgtatatacgtaactatcaatgagttgatcattcgttttatctagcacttgctttataaaggctgtaagtgaagctttaacgtcttcctgttctattgttttaacctcttcttgcaattcagttaaagcttctctccaccctagttcaggataggagagaagaaaagaagaacaagaaaaagctgtttgtaaactttgtctcataattttctgccccctttatttaagaaattgtcatacaagagcctggaccacctgtgaatgataaaccacagcttccttgttcgctatataaatctgccacttgttcacggtgagatgtcgggataacgaagcgatctttatatttcgcgatggcaagaagacgatacatatcttctacatcctgtttcgttaaaccaagttcttttaatacagcttcatttggctctttattaatttgcagtgctctcatatgtgttcgcataacagccatttttttcaatgtaagacgaatgtgtgattcatcccctgcagtgagtaaattcgctaaatattgaattggaatacgcatattatcaattgcagggaaaacctcttctgcttgccagttactacctttcccttccaccatgttcataattgggctaagcggagggatataccaaaccatcggcattgtacgatactccgggtgaagaggcagagcaattttccaatcgataatcattttatagataggtgactgttgtgctgctttaatccattcttcaggaatgccttgttttttcgcttcagctgctatttctggatcatttggatctaggaaaacagtaagctgagattcatataaatctttttcgtcttcaacagaagctgcttcttttactttgtcagcgtcatatagcattactccaatatatctgatacgtcctacacatgtttctgaacaaattgttggcataccagcttcaatacgtgggaagcacattgtacatttttcagctttattcgtttgccagttaaaatacacttttttatatggacaagatgatacgcagaatctccatgcgcgacatgcattttgatctacaagaacaattccatcttcttcacgcttatacatcgcaccagatggacaagatgatacgcaagatggattcatacaatgttcacatatgcgtggtaaatacatcataaagacgttttcaaaatctgttttaatttcttcttccattttctttacgtttggatcttgcaatccagttatatgtccgcctgctaagtcatcttcccagtttggaccccattcaattttgtcgataaattcgcctgtaattgctgatttcggacgagcaactggctgatgcttacgctgcggactatttgttaacgtttcataatcatagttccaaggttcaaagtaatcatcaatcgttggttgatctggattgtagaaaatattcataagacgtttcattttcgaaccggattttagctgaatttcaccatttttcaattcccagccgcctttatatttctcctgatcttcccattgtttcggataaccaatacctggtttcgtttctacgttattgaaatacatatattcagcacctggacgatttgtccaggtgtttttgcatgttacgctacaagtatgacagccgatgcatttatctaggttcattaccattccgacttgtgctttaatcttcaagccaatctacctccttcagtttgcgaattacaacgtttaagtcgcgctggttcccagttggaccataatagttaaatccataacttaattgaccatatccaccaatcatatgtgtcggttttacgtgaattcgagttggactattatgcgttcccccgcgattacttgttaatttcgtaccaggtacgttaatgtgacgatcttgcgcatgatgcataaatgccattcctctcggtatacggtgcgttacaacagcacgcgctacaacaacaccgttacgattaaagcactcaatccaatcattatctgcaacacccgcttcagcagcgtcctctttattcatccaaacagttggaccacctctaaatagcgttaacatcggtaatgaatcgaagtacatactatgaatcgaccacttattatgcggtgttaaatagtttaatgtaatttctttcccttctacttcaggtcgtgatttacggaacggtttatgttgcagaattggtttaaatgttgccatcgtttcaccaaattctttcatcatgtcatggtctaagtagaaagattgtcgaccagttatcgttctccaaggaatgagacgttccacatttgttgtaaacggtgagtaacgtcgtccacctttttctgaacctgtaaaggccggagaagtaattactgttttcggttgtgctgtaatttgttcgaatgtaaagcattcttcttcacgttcttctgctaaatcacgtagttttaaatctgtttgtttttcaagtgcttcccatgcttttactgccatatgaccgtttgttgtagaagatagtgttaataccgcttcagcagcattgattgcttctttgatgtctggacaacctttcgcgatagaatccgttcgaacgactcctaatttgctctttaattgctcatactctttttctgctgaccaagagatccctttcgtaccaatcggttgttttccggcatttggtccaagcgcagtcattttgtcataaatcgttttataatccctttcaacaacgtgaatttgtggcatcgtcttacccgggattggttcacattcacctttactccaatctttaatcttgccaagtggttgcgctaattcttgcggtgtatcatgaagaagtggtgttgcaacaacttctttcattggttcaagatcaattttcttcgctaaatctgacacagctttagaaagtgaagtgaaaatatcccagtcagagcgcgcttcccacggtgaaccgattgccggattaaatggatgtacaaatggatgcatatctgtactgcttaaatcgtgtttttcgtaccaagttgaagcaggtaagacgatatcagaatacagtgctgttccagccatacggaaatctaaattaatgagtaaatcaagctttccttctggcgcttcttcatgccactttatttcttctggtcgtaatgaatcactgtcgtcattcattaacccgtttgttgtacctaataaatgttttaagaaatattcatgtcctttaccagaactcgaaattaaattcgcacgccatacgaataagtttcgcgggaagttgtttgtgttatctggatcttcaatcgcaaacttcagttctttttcttttaatttttgtgcaacatattttccgatttcttcttgcgttgttgcaccagcagcaacagcctctttatataattcaattccatttttctcgaatgttggataagaaggtaaccagccaagtcgtgcagctaatacgttgtaatcaccgtgatgttgataacgagagttaccttcaactggtgacgctaaatgtccaacaggtgtatcttcataacgccattgatctgttacgaaatagaagaaggatgtaccgttttgtaatttcggtggaccttgccaatcttttgccatcgcgattgtttgccatccttctgctggtcttaatttttcttgaccaacataatgagcccaaccaccgccgtttacaccttgtgctccaacgagaagaacaagatttaaaacggcgcgataaatcgtatcagagttaaaccaatggttaatacccgctccgacaattatcattgagcgaccattcgtatcaacagcattttgtgcgaactcacgagcaatttgaataataagctcacgttttactcctgtcattttctcttgccatgcaggtgtaaacggtatatcatcattgaagtctttcggttcttgtccgccaagccctcggttcacaccgtaatttgctaacgttaagtcgtatacagttgtaacgaacatttcgccctcttctgtcataacctttttcactggaatcgtacgttctaatactttgtttccatcatcagagaagtacggaatttgtacagttccaatcgcttcttccattccaagtaaagaaagacgtggatcaatcttttcacctgtttcttcatcttctaaacgcaagttccatttcttttcattatcccaacgtgaccccattgtgccgtgaggtgttgcaaaatcattcgtattctcgttccaaagaacaggtttccattcccctaacttcgtttctcgtccaatatcagaagcatttaagaaccgatcagcaacgaattgatctcctttttgtttcaatgtgacaaagaaaggaaaatcagtatattgcttcgcatactttgtgaaatattccacttgattatctacgtaaaattcttgtaagattacgtgccccattgccatcgcaagtgcaccgtctgtaccttgtttcacactaatccaatcatccgcaaactttgttgattcagcgaaatcaggactgacagaaacaactttcgttcctttatatcgaacctctgctaaaaagtgtgcatctggtgttctcgtcattggtacatttgaaccccatgtcataatgtaaccagagttataccagtcactactttctggtacatctgtttgatcaccccaaatttgaggagaagctggtggtaaatccgcataccaatcatagaagctaagcatcggtccacccataagttgcataaagcgactaccagcagcatgacttagcatcgacatagctggaattggtgaaaagccaacatttcggtctggaccgtatttcattactgtgtacagtaatgaagctgaaacgagttgtaatacttcatcccaattcgcacgaatgaatccccctttaccacgcgcctgcttatacgtacgtgccttttcacggttttccacaatgcttttccaagcctctaatggtgactcgttattttgcaattcttcttgccacatattccaaagaacaccacgtacatacgggtatttcacacgaagtggactataaatgtaccaagaaaaacttgctccacgtgggcatcctcgcggttcaaaatctggcatatcaggacctgtagtcggatagttaagctcctgcccttcccaagttacaattccatctttcacatatatattccagctacatgaaccagtacagttcacgccgtgtgtagaacgaattactttatcatgctgccaacgctttctgtacacattttcccattcgcgatcttcatatgtttcttgtgtatgattatcgttataacgatctattggtgaaaaatattttaaacgtctcattagtgctgaagtttttttcttcatactgttcactcctcgtatagtatgtttaaacttaatttttttactttcatgagagacctgtaaaaaaaacggtatgttaatcgcgttagcggtgattatcgtattagtaattggcccgttcgtatggaaagcaattcaaggtggctatgatacaatcctagctcgattcacaaaagcatcaagcaatgcagatgtagattcttggaacaaaaaataaatgtaaaaataaacgaggggctactctaaaagggggtcccttttttacacagcattttttatgaaattaagaggggagtaaagaaaatgggtctgtatattgtgggattattactaagttacatgttcctaaatgtatttactgatttgaaatatagaaaaacgaagaatatgtggcatctactatttttaatattggggataggaatcacgtaccttgccggaacaagaacagggaaagagattgcaattgtactagtcatggccttagtgtgtggtttattgctagagacatttaaattttcttcacccggtgataccaaaatgcttgtggtggtaggtttatatgttagcaatgtagtagaagaatcggctatgcttaccgcaattacattaacagcttttcatttactattcttttggattgctagtgtgtatcgattaattaaaattttagggtttgcgggagcgattaaagaccaattggagcatgctgcttctatatttggggcaaaactaccaaagaaagaaatacagctaatacagagctttccaggggcttgttctattttattaggagcaattatgtatgttgctttcactatttatcaaaacggaggtatgttagcttgaatagtagaatcattcatcaaagagaaacgtatatttatttcacgatattcgcactagtaggggtacttattgcaaatatgtttattaatatggtgtttatactagcgtatccgttacttatcggattaattgtacaggttgttctgcttcagaagataaaaaaacctttttatcggagcggaaaagaattaacggaacagttaaaactaaaaaatatatttctagtagaatcaaacattttaggagacgaagaaggaactgtctatgaggtgcatcaaatgcctttttcattttctaatggattaattaataaagataagagttataaagtcataaaacaagagtatgatagaaaagtcaaagaggatttaacgaaaattgcaaaatggcaagttacaacaaaagctagacttgttacgacaacacattttcgtttatatacaatttggcagaaaaatagtaccggttatcaattgaaaaaaatagaagagtgtattgacccatatgccaagatgaatcttatacaatggatgattgcttcattctgtacgactggacgtttaaagtatgataagaagcctaaagagtgggaaagttacgaatggatcgccttaaaataaaaaggcaaaagtattctgtaaaattaaggctaagtgaatgtgcttttttatatacagagtaattgtttgtctttaatgtcacacattgaatatatattaagtacatcacttttaggtatagtgatgtactttttgatttttaaaacctttaaatgaatccatttacaaccaacatagtaaaactcataagcaaaaaaagaatagcaaaaacaatacatttaaacgttcaatttcctacgaggatattgaatttcataaaataaaactaaaccgtaatcttgataacctgagaaggaaatatatgaaattaactaaagaagaacttgtcaaaagactaattcttgcagaagaatatattgcagaaaataacactaaatgggtttcgaattactttgaatcatttaagtaggtgatgtacataaaggcatcatctacttttattaggggtcctactacattgctatcaagctaagtttttaaggtaccccctaaaagataattttgtgcccaattaatccacttaatggatattacattgtttgagatgttgcataatccttataacaaggattcttttttattatatttaagcaaaagagaactcttaaattaaaattagaatattagaagaccttcgaaagagtgctttatctacttctgaataaaacactgatttgaattatatttctcaataaacaagatatataaatggcataaaataaactttatgagatatatttagaggtcaccacgctattttgaggatttttacgtttagacaaaagtggacctttatgatggatgttaagagctatattttccaaaaaactatatttatatgttgaaaggaggattagagctgaaaattataatctacgctactttaaaaaatgtttttagtaatgatttttattcatataactaggaggagtaatatgaaattaatatcaaaaatagtaatgaccgcgttaattgtattgagtacatttgcattcaacttaggtggagaattagataagagttttctttctatcccaaaagcatatggggatgtaatcaaggcacttccacaaaatgcgtcaaagatagagttagattatgctcctgtgtatgattacgacacagacgggtgctatgcgactgcagcaatttctccagatggcacgactaaccctggcctaagtttgggcggttccccggaaagtgtctgtagagatgttaaccgactggaaaattcaaacacttattctcgggccaaatcaaataatggttggactgccattatgtatgcgagttactttgaaaaagatcaatcaacttcgggccctgctgcgtctggacatcgacatgactgggaacacacaatagtttggattaaagatggtcaggttcaatatgtaacttattcagcacatggtaactggtacactaagcctcgctcagacgttaaattcagtggaagccacccgaaaattgtataccataaggacggcctctcgacacatgcttttcgcctggctaatagcaatgacgagccgccagaaaactataaacaccagtggctccatttaccaatggttggttggaatggctatccaagcctagctattcgagaaaaactaatgactacgaactttggatctgcaacacttgagatcaaagatggaagatttgaagaagcccttgatagcgcaaagccatccaatgccaatgactttaacccttacgcaccggaactggaagatggcggtgcttatcaaatagtttctactttaaataatagtagtgttgttgacttaaatcaagcagatggaaatgttctgttgtggcaaaatcgcaacgctaataatcaaaaatggaagctagtatatgattcaaataaaaatgcatatcaatttaaaagtgtaacaaatgaaaatttagtattagcttggaatgatcttaatggttccaataatgtagttgctacatctaatcaaaataaggaagagcaatattggataccaacagaagcaggaaatggatattattatgtaaggaataagaaggatcaaaacaaagtgttagatgtaagtggttatggtactgcaaatggaacaaatgttacagtatataatttccatggtgataataatcaaacattcaaattgtctaatgtaacaggaactttaacaagagaagtggagtcactctataaggcacagcctggtcaaagcagtagatcaagtaataatttttcacttgaacatcttacggcaggtaccaaagtacgagttgttttagaaggagcaggtgctacctctttatcatttaacatttcaagagataaatcaggtgcagactctagaatttggtcagctgttagagatggttctattctaacgatcccttcaggagataatagaaagaatttgtatatctcaggtcctcctagcggatatacttctaacggtacatttaaagtgaaattctacgctcttccaaactaaaaaatattataaagtttctattccttttatattaatctaattagaaaatgagtatgcatacttcaaaaatttatttcggcttgctcgattggattaactatattaataggaaatatagtgttctgttgcaaagttttgttaagagataaaaaggtgaggttaagtacagctaaaaaccgaagtctgagccatgacttcggtttcttttatataagcctagtgaaaggatagctgttctggaccgcagccacatttcctaataatgaatttttgtatttttaatcattaattgtccatcccttgaaaagggagaattagaaaaacatagtgtacaaaaacctgataaataaggattttacttttaatatatattttaaaacatataccattgtattgacgtgtttcaaatattattaagttgtatttttgaaaggaacattctctaaagaagaaattttacaatggtttaataaagtggtagctgttttaggatcggcccttaactatgaaaaggaattatgggtaaaacaactaaattaaaaaatgtgagtaaattaaactgctgactaatctcactttttatgtactaagtaagtagtgcaagtggattacgaatcgtaaaaatgctcataaaaagattgcatttatttaacttgaaatgatcaaggagatagtgaatagtatgtaatattttaaaatgacagataatcatactaatactcaaactggaggataagaaggatatttaggaatacatacaaaaaggccttatttttatatacaggccttttttgaatgacaaatgagatatgactcaatatctcatgtaggacactttaattatacattacttcaagaatttagaaaagaatcttcaacaaaagctagactaattacgacaacacattttcgtttatataccattttgcagaaaaatagtacaggctatcaattgaaaaaatagaggattgtgttagtccgtatgcctaaatgaagaaatcaaaagagtaggcaagctatgaatggattgtactaaaataagagaccattatatggtctcttattttatatagttgttttgcatggtttgtatagatttatagatattatcgaaattttctacttgttctagaccaaggtttgactttttatgtccatcaagaaattccattacattcttttgataaatttctatatttataggtgttgttgaattttttaagaatgtttttggtagcaagggcatatgagatgatttaaatgttagctcacttttaattaaataactttcatatagctcacgaacagtttaaatttggtcaaacttgaacttttcatttttgttaaaaaggaagtaaattggttcctttttgttaaggttgttattaatggcacttagaatactagataattctttcttatactcaagagtatctttatcatcatctttattagagcgggtaatcatagtacaacaatcaaaaaaccttaaagtattaataagtaaaatgccacttaaatccttaattacaggaactaaactatattcttctttctttgctttataatattaagcaactgactacgtagcaggagttgtagaaagaagctgatacggaagattatgaagagagaaagttttagtggaatttaagcaacagctgattaactgttagtattttgctttgtaaaaaaaattcaataatttatcgttgcaaccgcttcctttttgtgtataatgaaggtaagttaataattaaaaggattgttactgttcagcaggcaaaacctaaattgatctagaggctacgggtgtagtgtggcttttggaatcagtttaggtttttttattaccttttgtgactttaagaagaaggtggaacaatatgagaatccataaaatcttaaataacaatgttgtttgtacgatgaaggataatgagacagaagttgtacttatgggcagaggtttgggatttcagaaaaaagtaggcgatgcgattgatgaatctaagatagaaaaaacctttgtgctagaaacaagagaattatcagagaaactcgctaagttgctaactgaaattcctgtagaaaatttagagattacagagagaattattcagtttgctaagacagttttgccgggggatttaagtgattatatttatcttacattaacggatcacttaagtttcgccttaactcggcataaagaaggaatgaatctcaaaaatactctgctttgggagataaagaggttctatcagaaagagtttgaaattggtctacaagctttgaacatcattgaagaagagactgggcttagactttctgaagatgaggcagggtcaattgcactgcatttcgttaatgcacagcaaggagagccggcaatgcaacaaacggtaacgatgacgaaaatcgtccaagatattttaaatgttgtaaagtaccactataagatgaacttagatgagaattcatttaattatagtcggtttgtaacgcatttgcgatattttgctcagcgtttaatgcagaaggaattgagctcggccgatgatgattttttatacgagcaagtgaaaaataagtacgaagaggcgtattgttgtacagaaaaaattgaagcatacttacaaaaagcacataatagtcatctttcaaaagatgaaaaggtgtatttgacgttgcacattcatcgtgtaacgaaacgcaatgaattatgtaattgaataaacgggattgttactgtttagcaggcaaaacctaaattgacttgtaatggagtgattcgtatgtatcgcaccgttatggttaatttaggttttttctttttataaaaatgataaatgagatgattgtaggggggagaaattattatgaagtatgaaaaattggcaaaagacatactgaaacatgttggtgggagagaaaatatagatagcgttatacattgtataactcgcttacgatttcagttgaaagatgaggggaaagctaatacagaagtactgaaaagtatggaagatgttgtgactgttatgaaaagcggcggacaatatcaagttgtaattggtaaccatgtatccgacgtgtataaagcggttattgctgtcggaggatttcaagaaacagaggaagaaagtgcgagtgagaagaaaaagagtagtctaatagatattctctctagcattttcactcctattttaggggtgttagctgcaacagggatgattaaaggatttaatgcactatttgtagcgttaggctggttaagtacacagtcaggaacgtatcaaatattaaatgcagttggcgattcgttattttatttcttcccgatcttcttaggatatacagcaagtaagaaattcggaggatcaccattcatcggtatggcaattggtggagcattagtctatccggctctatccggtataacagcaagtgagccattatatacgttatttgcagggactatgtttgaatcaccaattcatattacgtttttaggaataccagttattttaatgaactatgcatcatctgttattccaattatcctcgcttcttattttggagcgaaagtagaaaagtctttaaagaaagtcattccggatgttgtgaaaacatttgtactaccattcttaacgttactaatcgttgtaccagttacatttctcgttattggtccaattgcgacgtgggcagggcagttcttaggacaggcgacgctttggctttataattcaagcccattagttgcgggtgctttactcggtgctttctggcaagtgcttgtcatattcggccttcattggggcgttgttccgattggctataacaatttagcagtacacggtattgatccgatactagcgcttatatttgctgcttcatttgctcaaattggtgctgtacttggcgtttggatgaaaacgaaagatcagaaattaaaaacacttagtattccggcttttatttcaggtattttcggtgttacagagccggcgatttatggtattacacttcctcttaaaaagccgtttattatgagttgtattgctgggggagttggcggcgcaatacttggcgtatttggtacacaaagttatatgacgggtgggcttggcatatttacgcttccgacatttattagtccggaagatgggattacagctggattttggggagcaattgtttcgatggttgtttctttaatagtaggttttattctgacttacttatttggttttacaaaaaagcaaatatctacagaaacagatggaacaattgataaagttgctgcatcaaacgatgatgaagtaatctttagtccttttcatggtgtagttatgccacttcaaaacattgatgatgctgcatttgcatcaggtgcgttaggtgaaggcattgcgattgagccttcggaaggaaagttattttcaccactatcaggtacaatttctgcgctgttcccgacgaatcatgcagtaggaattacgggggattcaggtgctgaaattttaatccatattgggatggatactgtgaaattaaatggcgagtttttctcctctcatattgaacaaggagcgagagtagaaaaagggcaattacttattgaatttaatatagttgaaattcaaaaggcgggttatattgtgacgacaccagttgttgttacaaattatgataaatatagtatgaaaaaaactgaagtagaaaagattcaagcaggagattctttactagagctaggaattaaatagtagttacatttcattatgtttcacacgaagaaaggcattctttgagaatcgtaatacctttcctcgttaaatcttatataaaggagtttttctatatgtctaaagttatttttcctaaaggatttttatgggggggagcgattgctgccaatcaagttgaaggcgcatatgtagaagacggaaaaggattaacgacggttgatctattaccaactggtgaaaaccgctgggatattatgaaaggaaatattcattccttcacaccagtagaaggagagttttatccatcacacgaagcaattgatttttatcatcgttataaagcagatattgctctttttgcagaaatgggatttaaagcgttacgtgtatcgattgcgtggacgcgtattttcccaaatggtaatgatgaaaagccaaatgaagcaggattacagttttatgataacgtatttgatgaactgttgaagcatggcattgaaccagttgttacgatggctcactttgatgtgcctgttcatttagtagaaaagtatggaagctggagaagtagaaagcttgtaaaattcttcgagacgtacgcaaaaacgatttttaatagatataaagataaagtgaaatattggatgacgtttaatgaaattaatatgcttttacatttacctttcatgggagcaggtctagcatttaaagaagatgataataaaaaacaaattcagtatcaagcagctcatcaccaacttgtcgcaagtgcgttagctgtaaaagcttgtcatgaaatcattccagatgcaaaaattggttgtatgctcgcagctggtgcaacgtatccatatacatgtaatccagacgatgttcttcgtgcgatggaacaagaccgtgaatcattcttcttcattgatgtacaagcaagaggagcatatcctggatacgcaaaacgcttctttaaagataataatttaacaattgaaatggaaaaagaagatgaagaaattttaaaagagtatactgttgattatattggatttagttattatgcaagtagagcaacaagtacagattcagaagtgttaaaaagcataacgagcgggaatgtattcggttcagttgaaaatccatatcttgaaaaatcagagtggggatggacgattgatccaaagggcttccgtattacagcgaaccaactttatgatcgctatcaaaaacctttatttgttgttgaaaatggtcttggtgcaatcgatcaattaaatgatgaagacgaagtgaatgatgagtaccgtattgattatctaaagaagcatatgatcgaaatgtccgaagcaattcaagatggagtagatattatcggttatacaagttggggcccgattgaccttgtcagtgcttctactggcgaaatgaaaaaacgttatggatatatatacgttgataaagataatgaaggaaaaggttcattaaaaagatcgaagaaggacagtttcaattggtataaagaagtaattgcgacgaatggtgagagtttaaaattttaattaggaaaaggaggcaccttgatgtatgtcttttagatatgtgtaggtttagacaaaaccgttatcttgtagtaagcaaaaagagcatacatgtaagtatgctcttcgataagaaaggtagatctctatgagcggagagactacatacaaaagcgtatgtttgtttcctttaaatgtgaagaaaaatcaacaaaaggtcaacgtaaatttaataaaaattcaacaaaaccgctattttaaataaaagagcagttagtgagatctaactgctcagttttttgaaaaataagaattagaatttgtttttttatgttttacatcaattaacgaaattgcattagagaggttaataaatttttatggatacgcaataatgtttggacatcgtcttcttgaagctgctgtaatgctagggacatcgctttgtaggaagttgagttttcaatggattttttcgatgcctcttgtcctttgggtgttacttttaattttatttctctacgatcttcatctgattgttttcgttcgatgaactctagactaactaaatcatctacatttacactcactgtacttttaggaactgaaagacgttctgaaatctctttcagagtgatattagggattgtataaattgtatttaaaatacccatttgttgtactgttagccctaaactggaggcattttgatgtgtgaactttataatttctttgttaatggatataaatgactgaacaacttctccagctagtttgaaattgttgtcttttaaactcatgatactcaattcctttctttcttaaattagcttaacataggatagttcagtgttgaactatttatttataaactaattcagaaaagaaagcaccatattgtattgatagaaaacttaatgaaaatttcattttgtattaagttggaatataaaaagagcacttagtaaagtgctctcgtgacgagcctcattttataacgactattttataaagaaaggaactcagaatattatatgtgcgccagtcaattgagtaccttgtacaaataaagagcagctagcaaaagctaactgctcaggtaatggaatatggttcgaaatgggttgtctacagtattgacggaatattggtttttattcgtgaagaattacgtttaacttaatgcatagccaacggtcaaagttagtgttaaaaacactgataataaaagtattagtagaacggttgctatgtttctaagcatcgcaacccaattatttattttagaaaatcctttcataccagcaaaaaaagttcctattgttaaaactagtaaaaaaataaagggtggataggtagtgaattcataataaaggttttaacgattaggcatatttaagaatctcgaacataagatggtaatgacaccgagaagaattcattgtgttcgctactcgcgttaatacgttttgaaaaggcacctatttaggtgcttttttgtttacatctttcgagatagacgagcatatattggaatgtgtggatggaaaccattttatatatcagagcacctatcaattatgggtgttctcttattatgtaaaaattttataagttgtgtgggagttgaaaaatagtatattatctttcttaatgtacatattaataaaagtttttaatatcatacataaaaggcgggataatatgagtgaaaataagaaaaatgaagaattgaataagataaagaaatattattttaatgaggacaatcaaccagtagctggtatagagctaattttgccgccggatataggaatcatgttagacccgaaatcagttaatgatgaaagtagagataaataagtttaatttaagcatccattcgggtgcttttttctttgttatatagaaattacacatgatccccctttaatacatgacttaggcatagttgggaatgagatatcatataatgatactgaacggtttccaacatgttcccctatatttttttaagcgagagcacttattgggggagtgctctctttcgtttgcacataaggaattcccaaacatacaatatcgagtcaatgccaatcaacttattccttttccgatatatatatattccgctataaagcccttttaggttgcgccattagaacgggcaaggcattgtcgtatattttatactcagaagcttagggcactttatagtgttctttttttattgaacaaaatggaaatttgaatagaaaacatatccttaaaataaccttaatttaactatgaatttaataataactgaaaactaaatggtataattttctaaagaaactcaaataaagtttattttagaaaaggggtagaggaaaaatgtttcagaaacttaaattttatttaatgagcatattaattagtgcatttttaggtgggattattataggtgctaatttcttggtacataacatatataatttagttgcaggtaaagaatatcaatttaatatgtggtcttctattattatatttagtgttgtatttatttcgggtttctcgtacatgttgaagaagggaccagatatacttgttaatgattaaaccaatagcaattatcgtaggcgctgccgtgatatgggtagcgtcttgtttgttgttaaggaaagataagggatgagatagacttgcaaattgaaatattattagtctaaaacataaaatatagactagtaaacaagctgttttcaccttttaatcatagaatatgatgaattctatttttagaggagggaatcatatctatgggatggaataataattttggacattctcgagattgtaatagattttgggatgatttagtattttgcggatgcggtcgtagacgtagaagaaacgattttaacgactgtcattgtagacgcgattgcgattgtgatgagtgtcgtcgtagacgtgatcatgaccgcaatcgtgatcatgatcatggtgaacatcgagattggtaaagtcttttgaaggagtgcatatcttaatagcactcttttttattttataaagaatttactttaaacatttcttataactaagaatacttatgtaaatataggaaacatatttgattcttggaatgaggggatcgatgtggatataacgcaaagtattgcaagaatagttgctaatgggatagatcttccgtttacttcagttagaacaactgcgtggattaatggacctgcaaatgatttaattgttacgactaggcaaagagtgaatgagctttatcgtgttatgtggtcgcgggtgccagttatgctaaaaatgtatttcattcagggggcggacatagtaagatttgctagagttgcaggagttgatgaaagtataacgggagaatatatatatcattttatttggtgataagacaaactttaagtaacctaacagctgcttttttattttataaaaaaagaacctgcaaacctgcagattctcctgataatgatttatggagcaagacccgaaaatataatataataattcgaaaatgagttcaagtaaataaaaagaacccgctggagttcgggtcctttcagaagtgatgatgtattctcggcttgggaactgagaaaaacacaaaaatataatacatcgagttttagagaatttcaatattaaattaaatattatcgtggagggagttatatcatttgatgaagaaaacaaggtagtgataaagcatatgaattttaaaaaaatgagcgggatatcttaagaaaacataaaattattgaaatttttgtatgaattcattaatatggaattatatttattgtttaattgattccgtttattcccacaccttattgtgttgtggttgagttgtagaagcaagttgcgtcttgttttatttatgaaagggcttttttgagccgattagtgtatatatagcttattttgctatgcacatttttaatcgacttgaagaagccctttttgtattgtcttcaagttaggaatcatttgtaaaaaggtctttagatttaggtatataaataaaaaagggggaatctatttgtatcatgtctatttcaatggatgtatacgagatttccttttttattggagagatgctttagagggaaaagttatcgctttactgcaatccgtgattttctagaaatggatgccgattctacacagctatcatgtaaaaactgcagatgtggattgtctttttaagaaagatgatcttgcaaagattgtgcatcatgattgagtgttagaagtggttaagcgtgcagaaaaaagtaaactttctaaaggtagattgaaaaagatagagtttgtaattctatctttttcttatattcaattactacagaggatttaaattcactaaaagaaaggtagaagagaatatgaatacatctatgaaaaaaatctagtaaatttacgagttgattttgctttcaagcgcttgtttggggtagaaggaaacgaggatatactcattggttttcttaatgcggtattacaagactctttagatgaggaaattatttctttgcatttagatgatccacatcttccaagggaacaaaaggatgataaattgtctattttagatttgcgagctacccttaatagtggtataaaattaaatatagagatacaggttcgcgacaaaaaagacatgatcgagcgatctttgttctactgggctggcatgtattattctcaaatgactcaggggatgaagtatacagaattaagaccaaccatttgtattaatatagtggatttcattctgtttccaggagaagaggactttcataatatcggtgtagtcatgaacaaaaaatcggagcacataatttcagagaatatgcaattgcactttcttgagattccaaaggttattcgagaatggcaagaaaatcgaatggatccatgggaggatatattagcacgttggctattattatttcctgcatatgaagatgagaaattaactacaatcctggagggaatcgcgatggaaaaagatccagttttgaaaaaggcaatagaggattgggagcgtttaagtagtgataaagactttttacgcttatatgaggcgagagagaaggcaataaaagatagaatatcagaaatagagacggcagaagaaaaagcagcaaaagaagctagaatagaaatgattcataatttaattaaagtaggtgtacctatagagaagatagcggaagccgctgaattaagtgtcgaaaaggttaatgaaattttaagaaacaaagagtagatagaagtagtgaaaaacaggtacttgtgaaaaacgcacaattacctgttttttgtttctaatgaatagtttgataaacacaaggcttagacactccttaataggtagtatactcttattaaggagcataataagttgttggagagattaaaatgaataagaaaaaagaagcgcatacccttagagataaaattccaaaatggataaaatagaatcatgttgctcactgaaagaagatatacattcttatcaagacctaaattgtaaaaagtcataaagaataaagtgcgatacatattagacatgaccaatatgtatcgcacttttacttcatattggggtcccgccacatcgctatcaagctaatattttgaagaaccaccaaaacaaaaattttacctctcgacagttatatttgagaattaagcttattttttcgttttggggtgaatctgttttcttaagttgatatgcatgtatggtgacccctataagtggcgttttttaccgttatcgatttctatcaatacctagtgacgttaataacagaattgccaaatttaccgattcaccagcagctaacgatttgaaataattacatgccttggtcgaaaaaaatccaagccacatgtgcaaactagccatctatccgaaaaaaattaggatagatggccattcatcgtgtgtaccgaaaaggtggccctttttttatatttcgggcttactttccactagaaattgaaatactaaatttagactgttgattaccgaatcgttccaatgtcccctcgaatttcattccaactctttttaatagtccacaagattccatattaagtgactgagtttcagcgacaatagtggttaagtttaatgcactaaatccatggtttaatactttcataatcacttcttttgcatagccttgaccccaaaactcaggtaaaaattgatacccaatctctgtattaatcccatcatgatatgtatcaaggaaaacaaaacctataaattctttactatcttttaaaaatactgtccagtggagggagctattttttgaatttaatatatcataaaatctaattttatatgcttcttcgtcgataatacctcctaagtattttcttactagctcgttttcatataattttttaatgtttttataatcattttcggaaattacgtgtaactcacatctctcagagaataacaagtaaatctctcccttcgataattattattattttcctggtaatccacctatgaaaaatatgtgctctacttacaaaatcatataaaacatacatcctttcttatttagtcttccataacatggtatgatgtgaaatgcttaccaggtcaaggggcatttatcaatttttttgtatgcgctaatatgtagtgggaagggagtgtgtatgatgacaaatattaaaaaatcgcagaactggctggggtctcgatttctactgtttctcgtgttttaaataattatccgtatgtaaatgaacaaaaacgaaaagagatattagcaattatcgaaaagttaaattacacgcaaaattcgaatgcgattcatttagtacgaggaaaaacaaatgttattggagtgcttcttccatttgtaaataatcaatattacagtgaagttatagaaggtatttcaagagaggctgtaaaacataattacaatatgatgctctgccaaacggataatagcgcggataaagaaatagagattttgaatatgttaaagatgaaaaagttagacggaatcattagatgttcgaaagtcaatgtctgcacaggccaaagggacattatcttggtgctctcatacggattccgaagccatcccacaaactccaccaagtcctctaatcttatatgcttgtaatctttctctgtttcctgtaagtacaagaaatactgtttgagtacaacaataagtcttccgtgtgttgctgcttttccctgtaacatccaaatacttgaggtacttcaccacaggaatcacaggaaccccatctgaatctactaatatgtatctctttccattctctaggatcacctcttgtacacgcatagttcttcacctcttaactccgttgtacgatcggtctctcgaccttgctacgcctcacgttgtgggctatattccctaatacaaaatcgaacgtaagttctcgtattattgtatacataatagaccatactttcaacctctaattatggaatatatcatgtaagaaaaaagcggatttatgccctaatattggacatagtatccgcttctaattatagtctgtttaagaatgctttaggtcttaaggacggtaatattttttttattcttatagtatggtacgatcctaacaaagagggtataaataaaggtgtaaacaaggacttgtttttataaaaacgtattgctataatataaaggtaataagattttacaataaaaatataaaattaatcagttcgcatataagagaagacctcaatatgcgccatgtccttaggggacgtgtgcgtgtattggggtctttttgcgttttgcgagcaaaaacatccggaggtgcaggaattatgttgaattggttgtctgcaaaacttatgacaacatcagtaggagatttcttactggcaaaaagtagctttacgaaggggcttggtggtagtggcagtggtgccaatgctgaaaccgtccaaaaaagcatgaacactttggtgaaaaccttaattggttttgggggaatatgggtggcagcttgcgttgtatttgcagctattaaactatctggtgcacaagggaagaatcctgaaaaccgtacacaagctatgattggtttagcctgcgcagcaattggaggctttgtgatgatcaaagcgtacgatatcgctgcttgggttacgacaatctaacataagagtttgtacaagctttcctcgatttggggagagcttctcttatacaagggaggaaaaagaatgagaaaagtaaccgttcctgttgatatgacttcggaacaaaaaacactactaggtgtgctgagcaagcgccaattgatttatctattgggtggcggagcatccctttatttatatgtaccatttttatggcgactatttgcacctattgatgcagtagtagcgttttttatttgcttaattttagcactaccaacggtaataggtgttatagcgtttgcgtttatatataaagaaaaacaacatatgtatctagataagtatttaattattaaaatgcgtagccgctccgaaaaaggtaagtggagaaaagggtacgagccaactatatgggcaaaggagaatctgtaaatgttagaaatgatatattttgcggcgatagccattgtaggatttttcttttatcggaaaatgaatggaaaaccactgtttggttctaagaaaaaagggaaaaagcaaggtggagtagagaaacacactattgaaaaagctggaaagaaaaataaaaaaaatatgtctgctgaatcggaaattgatgaggataatgttgacttctttcgtgcttttgtagaagacattaaggaaatcgataatcatatgattcggtatcatgacgacacatttgtcctgattgcggaagcacatccagttaactattacttactttccaatatggaacaagaagcgattgatatcaaaattgaatcatggttaaccacattagagtttaatacgaaagtatatattcaaagtaagtttgtagatttaacagatcctgtacgaaaaatgacagaaacaatgaaaggtgcgaaggaccttacaccagagacagttctatatgggcaagaagttatcgataacttagagtactggcaacgttcgcaacctcgatatgaacaaaaacgttatttaatttacccatacaaggttgatattagtacgattactgctgatacagaggaagagttggaagaaaagattgtggataaggcgtttaacgaattatatcgccgttataatgcttctcgaaatctactatcgaaagcaaaaattaatgtagaaatgttaacgaaagataaattaatagaacttttatacgtagcatttaaccgtcgtaaagctgtaaaagctcgtttccaggacttaattgaaaacgagaatttctccctctattcaacaggagaaacaaatgaaagaaaactagagataatgaagaaagtgctagcggaagaaaaagcagaaaaatcaaataacggggtggcgtaaacatgaggttattcggaaaaaagaaaaaggaaaagaaaaaaatagaagcagaagagaaggatgaattgcagctagaggaggaagaggcggaagaagaggaagtaccgacgcaattagataatcaaacaacagtgtttgatgttattgctccagaaggaatgaaaattgatgcagaagattatggggtcattaaacaatctttaggaagtaatacgttcttccgtccgttttatattccacgtgatgggtacccgcgtatgatgcaaaccaattggctcaacatgttaacttcggctggggaagtggatgtcatgatcgatattcataaagaaccaaaagctaaagcaatgcgatcattagatatgcagttgacgatgttacgttcgaatctttctttccaacgtacacgaggaaacattgaccaagaaaaagacttagatgcaaaaattcaagatacaaacaatttaatggatgaaatccagttcaatgaaaacgactcctatatggtgagtaccatgggtgttgcgtatgccgaatcaaagaaagaattggacgttttatgtgagtatattgaagatgaaatgcaagcatctcattttaagattgcaagtacttggaaccgtgtgaaaagtggtttgaaagctactatgccattaggtgcaccaaatacgctgcaagatacctatcgaaatatcgatagacgtgcgttatgtacgtttgcaccatttgtatcaggatccgggagatttaatggtggcataccaataggaaagaataaaattactgggcaagtagaatttttaaattcatttggtaatgcagattatcgcccgccaaactataacattggtgtaacagggatctcaggttccggaaaaagtttacttttaaaaatgaagttagctcgtgaaacgtcacttgcagatacgcatgcaatgattatcgatccagaaggagaattcgtaaaaattacaaaacgtctaggtggtattaatttaaatatttcacctgaaagtaatatcattatcaatccttgtgcaatcgctgtaacagaacttcagattacggataaagatgaagagctagaagcacttgaacaatatgataagaaagaacttgtagagtgtgatggcatgaagtatgtgagatttgtaccaattttagagaaaatcaatgaaatactaggtttctttgacattattattcgcgggcaagactttgatcaaccaggattaaatgtattccaacgtactatgctagaagatgcaatccgtgaagtgtttgataaacatggtattacttcacatccttcctctttatatacagatgaagtgaagaaagtggatggacagttaattcagtctcaagtgagaaagccagagccagagttaaaagaaatctatgatgtcatagtagaacatcatggagacgatgtaaaagcagaagagttaattgctgcgattcgaccattcttacgcgatggttcaaaaccattatttgatggacaaagtcattttggtcgtggtgtggaaactcagttaaatgaatcacgcgttgttaatttcaacattagtcatttagaggaagggtttttaaaaccaatcgctttccacgttatcttgaactatatttgggagcattggattaagagtccagaacatgctatcaaacgaaaagtactgtatgtggatgagatgtggcagtttatcgattatgaacaaacggttaacttcttagaaaaagtagcacgtcgttcacgtaaaagaaatgccggtatgtgttgggcaagtcaggactttgttcgtatcttagaaaatgtaaaagctcgtggtatcttgcaatctactttctcttatttcttcttagaacaaaataaaattgataagaaaaagatccaggagaactttaacttaactgctggggagcttgatattattctcaacaaccctggaaaaggagaagggattttccgtgtcggagatagttcggtttggattcaaactgatccatctgacaaagaaatgatgttcattgaatcaaatgaagcggtactacaagagcttttaaacaatatgaagaaagtacaagggtacgcaggataatggcgtactcttaaaaaggaaggtgaaattatgcttgagaaaatagtagagtgggtcggaggcttaattattgctatagtaaaggcttttcttagtccggtgtatgcaactttggatccgctgccagttttagtgtttggaggagagggaacagaaggaaaggggacaaacttagatttcttattttcaggtaattctctaaccaaagtattagacacaggcatgcctgtcatgttcaagcttgttgctttttgtgtccttgtcagtgtagttattacggcggcaaaatattcggcaacagctattaatccaaataatagaacagcattaatagagtatgcgaaggatttgatgatcatttcaatttttctttggcacctcgattacttctatacactcatatttgaaatcaattcttggataataatagagtttagagacgctgttaatgtagcaagtgggggggattttgatccagataagggtactaaatttctacaacctggatttggtggggctggacttaccattactgagctgggtttgaaaggtcatgaaaatgactatatgtttattatatttggtttgtttatagaagctggtctcatcgtctgggcaaacttttactacttaatgcgagcggtgtcactatacgttttaatgttaattggtccgttaatggtaggtatgtggctatttccacaaaagaaacaacagacattatattggatacgtgaatttataggagcggtgttcatacaagcaattcatgcaattaccttatggctcattatttctttaattggagcagcaaatagtccgttaatcaaattaattttacttgctatgtttatcccaataggtgagattgtaaaaagttttattggccttagtaccaatgcatcaggtggcattcatagagcaggtacgatgatgggtatgggtgctttagcaagtgtggctggactcgttaaaggtgttcgtgatgactaccgtaattcaaaagcaaaacctgatgataaaggggataaagaaaagacaaaagaagatgctgataacccgaaagatgcattaggagcgaatttagggacagatgttggtacaacatctcgtgcagctcgtatgttaaaagctggtcaaattggaagttcaattggtaaagcggctggtggacttgcaggtatgacagcaggagctggtcttggaccagaaggaatggcaatagggacatttgctggcagtaaagcgggcggatttactggtgcagttactggaagatctgctgctgcagttggcgaaggggctgtagccttaggaaaacatattggttcgagtgtaaagaagggtgcggatacgtattcaaatctaaatgacaaatcttatccagaactaaccgatgaagatattgcacaggatttagctacaaaagattttgaaaattggaaagcggataatcccgattctgcagttgcaagtcgcttaaaacacgcattccctagtgcctccgatgcagagattgctaaaaaagtggcaaaaacaaacaatgatcaaatgtctcgtttctcaaatcagcggaaacaagatttacaaaatatgaagaaaaccgctacaccatatggaaatgctagagagttagttaacgctgcaacgaatgcattccaaaagggttatgaggcagaccataaagatacgtttatgagtcagttaccagaaaatatttcagcggaagagaaagagagacactggaacgaccacctgaacacaaaagtacaaggatttagaaaccacgcagaacaggcggcaacaaaagcaggagccatgccagttgatgcgaaggataagcaaggaaataatctgtttgataagtcctatgtgaataaagatgcgtttgcttcccgacttgcattaggaaaagtcggaaaagcagttgaggatgtaaaaggagaaacgttagaaagtggccatcaaaatatgggacaagtaggtgctcttgtcggtgcttctactgctgcatttaagaaagcgtatagtgcagaccataaggctggattcatgaaacaattccctgcagatatgccgcaacaagaaaaagaagccgcatggaataaacatttaggtcaaaaagtacaaggatttcaaaatcatgcacaacaagcggcggaatcagctggtattgtacagcaaaaagatggtacaaactatgcgaataaagaagctttcgcttctcatttatcacaacagttacaaaaagatcctggtttaaatgctatgggtgtatctagcacagcaggcattcagaaggcagtcaacggtgtgaaaacgcacggtttgacaagtggagcaggaagccagaaagcgaaacaagtaagtaatgttgagaacctggtacaagcctctacagaatcctttaaacaaggctatgcagcagaacaacaggcaagctttatgaaaaagttgtctccaactatgtctcaaccacaaaaagagcaagcttggcagtcgcacctgaatgaaaaaggaaatgaatttaaagcagtggcacaacaagcggcagtacaagcgggagcgatgcccgtacaggcgaaagatacgagtggtaagagtttacataatcaatcgtatattaataaagatgcctttacttcgcaattaacgaaaggattacaaagccatgcaaatcttggaacagtgagtcaacaagtaggttctggaattactagtgcgattcaaggtgttcgttcacatggcgttgcaacaagtagcgcaatcaataaagcagtatatgcagcgacacgaacgcaagccagtatcgcacgtgcaggagatctttccgttgcggaaattgaacgctcttatgcagatgcatcaacaagtgtagcaaatattgcacaaagtgctggtaaaatgtctatcccaacatctgcagtgggacgtatgacacagcagagtacaaaacttggcatgagtgtaatggaaggtgcgaaacaccttatgcttgcggatagcattgatacggtatcaaatgcatactatagtgctgcgagtgctgtacaacaatccggagggaatgcagtacaaagaatgataagtggaactaatgctgctgttaatacatcattaggagggaatgcagcagagcgtcactataatgtgacaaaaggcttaagttacgccgcaggtgtgattggtggtgcaggtgcttatcaagcgactgcacgtatggtaagtaaacataatccttataacaatgctgttcaaacagaggcaaaagaaattcaagagattcagagaatggtaccaacaacaacggatgctactggaaaacaatcggttgttcaaggtgcagtacgtcttgttacgacaaataataaatcctggattgaagcaaaagattctagtggcgtgacgcaagttgtatctcgttatgctagtggtgatagtagtattcgttcgggacaagtcgtatatcaagatttaaatatttcggacggacaattaacgcagtaccgtaatggtatgaaagctacaccagcgtatgttcaagattctagtggtgggaaaattagtatcaatcgttctatcaacgttaacccaaatcaattagtaggaaaccaaaatcaaaggtcattacaccagaaatcagtatttaatgaaccgccacttacggtcaatcacaaggtggacaatggtcacttctatatgtctgatttagaccaaggtggttataagaatgtacaaatggtcgtagaaagagatcgtagttatatggttgcgacaacaacagacggtacactgtcacgtatttcgccattcggaaaaggagatacgcgcttacaagcaaaccaaaggattgaaagagcttgtgaagtgaaggacagtagtattaagccaagagaagaaattctagtaacacatacacaggacaaggttgttcgtacagagacgcacctgaatttatcagaacatgacccacaaaatctgattccatttgcgccaaaccctcgcttagcacagcgaagaggaagaaattctcaaaatggaaaatatggtgtgataagtctatgagtcaaaatcctaacgatccaaatgaacagaaaaaaagtaatcctttaaaagatgtagcttcccactttattaagaaaaaagggatgcaagcgcgcgggaagatggcaaaattggcagggaaagcaggaaaggcagcagcgaaagctgctgccaaaatgctaaaagcaggtatactaaaaattgtgggtgccgttatagcagcggttggagtacctgccgctttaattatgggagtaattattgctgtgtgtgtgattttagtctcttttgtaccttttactgatgatgaaggtaagacagaggaacaagtaaaaaaatatatggaagtctcaatggctttgaatgtggattggaaagaggtcgtcgcctttgacatggcacgatatgataatgatttaactggtaaagatccgcatgatgctatatcatatttcttggatatccaatatgaagaatatacggaaaaagaggtatgcgaggaaggaccgaatggtccttgcgaaaaaaagaaaaaggagatgcaaaaaaccaagtctgaaagttattctggaccagatgtaaaaaagatattaggagatacagattttaagaaaaaaatagatgagattaatgcgagtggaagtaaaaaagtgacaacatcttctcatgggctagagaaagccatggaactcgcaaagtttagtaaaagtcaaaaagagcgggctcgtgagatattagaagccgggatgttagaaggaatgtatggacatcttgctcctactactggtggatatattggtggtatgtgtgtaggtgctgtgagtccaggtggagaacctgtcaatatcaatgaaaaggtaacaggttaccttcctaaaattaaagagatggcggaaaaacatggggttgctcaatatgttggtattctcgcagcccaaatgatgcaggagtcagctggagcgggaaatgacccgatgcaagcagcaggcgcgacacgtttctctataagcgtttagacgtgaagtgagagtgttgctgaaagattttgtacatgcttaaacaagcgaaaatgtacatgtttatcttgacatttacatcattatggtacaaccgtgtatacatttaccaaacaaactacatagtttaaattagtaaaatatattgagaggaaggaaataaatctatgaaagtcataattttgtgtggcggaaaagggcttcggatgcaaggaattttagaggacattcccaaaccattagttcgagttcaaggaaagcctctcctcttgcatataatgaattggtatagaaaatatggacattctgatttcattttgcccttaggatataaaggtgagaaaattaaggaatattttatggactttagctggaaagagaatgactttagtttgaattttaaaaccagtcaatatacgctacttcagaaattagaaaattggaatatacactttatagatacaggaattgatacaatgaccggggcaagactaaaaaaacttgaatcctttgtacagggtgaaacctttttattaacttatggtgacggattagccaatatagatattgatcaactaatagcattccataaagaaaaaggaaaaattgctacattaactggaattaaaaaaaatagtcaatacggcctattggcggtcgaagatggaattgctattgattttaaagaaaaaccattacttgatgaagtaattaatggcggtttttttgtatttaacaaagaaatattcgattatttaagtaataatgatgattgtgttctagaagaagatcctcttcgaaatttaataaaagacaatgagctcgcagtctatgaacacaatgacttttgggctagtgtcgatacacctaaagatttaaaaactgtaaatgaaagttggaatccaaataaattttagtggagaggactgaataagcattgaactctaatgataaaaaaataagtttacctcgattgtatatcccctctaatgagaaaatagttaacccactttcaacaggaattaaagcttcaaatctctccaaaaaaaatactcaaaaaagaattgatccccaattctataatcaacaacatgatctaaataatcatttctgcgtcattgtaggtagtgagtatgtcttgaaaattattgctttacagcaatcattaatgcagtactcagaaaaattcacattgtggatttgttgtatagatccttttgcatattcactattaaaagaaatgagtttaattaatgtaaaccttttacaagttgaagaattggaagatcgtgaactaaaagcaattaagagaaaaagaaaagtaaatgaatattgttggactttaaaatctgtcttgatagaatatttattggtcaattatgatttaccatctattctatattgtgatggtgatttatgctttttctctgaccctaatattatttttgaggaatggggtgaccattctattttcctaaccccccaaagagatcgtgattgggtagaaaaaatgtatggaaaatatcaggctggtctaattggatttaagaatgatctctatggactaaaaagtgtaagatggtggaaaaataaatgtatagattggtgcagtgccgaggctgaggaggggaaatttggagaccaaaagtatttagattatatccctatatattttccaaaagtaaaaatttcaaataacttaggtataaatgctgcaccttggaactgtatatataataacgattataaaattgacaagactaaaaacgatatatttattgaaaacgacaaactagttgtttaccattttgcatgtattactatctttactgaaaatgattttgatctttggtctttgggagaaatttcaatacccaataatatattaaaccatatttacactccgtatttagagagaattcaatttgttttaaagcaattaaaggataaattcaataaagatactaaacaatttttaagtaaaaaagatataaataaagctcaaactttatataaagattcacaattaagaagaaaaatgaatcaatccaatcattttatgaacttttccatgattataagtaaagaacgattaattcaaggattgacctcttattattccttagaaaatttcaacgctaaatttactgtatggatctgttgtatggatgatttaacttatcaaatattagaaaaattaaaattaaagcacgccatactaattccggtacaagaaattgaaaatcatgaactcctcagtataaaaaatgatagaagtttacaagagtattgttggacattaaaagcgcccctatgtctacatgtccttagtctttatccggaagttgatcacattatatattgtgatgctgatatgtatttctttacagcacctaatatcattcttgatgaatggtggaagtactctgtattcctttgccctcaaagaagctctactgaaattgaaagcatacacggtatataccaagctggtttagtaggcttcaagaacgatcaaaatagtaaagaaattttaacatggtggaaagataaatgcctagaatattgcaataatcaatatgatgttgaaatgaatagatggggtgaccaaaaatatttaaatcacattcctaacatcttttctaatataaaaatcatgactcataaaggtattgatgcagcaccttggaatgtcattttaaatagcagttctatatccaaaacagataataaagtttttattgatcaagatgaattaatagcttttcattttggaagtatgcaaattattaatccaaatgagttcgatttatggaaacaagaaactttagaattacctccagcagttttagattatatatacattccttatattgaacaattgaacaagacatgtcatacccttcataatacttttcaaaaatctccctcctctttatttgctgaccaaattgatacaacaacaataaaaaattattttaaatacccctccactcatcacaattaagactgatactttccttatttaaaaataaatctatttatttcagcaactaaaaatacatcttaataaaggatagattatcactatgattgcttcatttaaaaataaaactttccttattactggtggatacggttttattggttctcacttggcacgaagacttttaaatttacaagcaaaaattgttcttttcataagaacaccatcaaactcttggagactaaaggatattctaaaatatattgaaacctatgaagtagatatacgagataaaaaacaagtacaagatgcaataaagaaaattaatcccgattatatctttcatctggcagcctatggtgtaaattctgcccatacagattacatccatgctatagaaacaaatgttatagggacttgtaacattattcaagcagcaaaattggtgaattgtaaaaaaatcatcaattttgggagtagttctgaatacggtaacaagatggaacctattcatgaaaatatgttactaactcctgtggacatctatggaagtaccaaagctgctgctactatactcgcccatcaaattgctagcgaaaacaatattaatcttataacattaagaccttttggcatattcggagaaggcgaagagccgcataaaatttttagctatataatcttgcgagtattacaaaacaaagatgtaaatttaactttatgtaatcaattaagagattattgttatatagaaaatgtaatagatgcctgtatcctagccgtagaaaatactactgtacaaaatgaaatctttaatattgggagcggcactattcaccccttgaaacattatgtagaattattattcaaacatttgaaaaccaattccagaccaaattacggtgcaatttcctctagaacaaatgaaagatgggttcctgaagcggatgtgcaaaaaataaaaaactctcttttctgggaacctagaattaatattgaagaaggaattataaaaactgttaattggtataaaaataataaacatttatacctaaccccctaaaaatagggtactaaaggaggtggactaattgttaaaccaaaactttaataatgctttttacggaaaaagaattttaattactggacatactggttttaaaggttcttggttatccctatggttgaatgaattaggtgctactgtaatcggatattcattagattctaaaaataaaaatgataactttaacattactaaccttcaaaataatataattgatattcgtggagacattagagattttaataaattaaataacgtttttacagattataaacctgaaattgtattccatttagctgcccaacctctagttaagtattcatatgaatatcctagagaaacatacgaggtaaacgttgtaggaactatgaatgtactagaggcaattcgattacatgaatcagctaaaataggaattatggtgacaagtgacaagtgctatgaaaataaagaatggccttggggttatcgtgaaattgaccctatgggcggccatgacatatatagctcaagcaaaggatgctgcgaacttttaatttcttcctatcgtaattcttacttttcagaagaaaaattttctcaacataagaaaataattgcaagtgttcgagctggtaatgtaattggtggtggtgattggtcaatagatagaattattcccgattgtatacgagcattagaatcaaacaaaaagattattattagaaatcctactgctattagaccctggcaacatgtactagaacctttaagcggttatttactccttacagaaaaaattataaataatggtatccttttttcaggagcatggaacttcgggccatccctaagcaatattgtttcagtagaaaaattagtgacaagtttactagatatttggggctgcggggattggacagcagaaaatataggtccaataaattttcatgaagcaaatttactaaaccttgacattagcaaagcaaaattcaatcttaattggcagccaaaatggtccctacaacagactttagaaaatacaatagaatggtataaacattataattcttacaccagttctgagatgagaaatctatgtattagccaaatcaaacaatattgcatgctttgaactactcccacttacccatacttgctgtgagttccttatggagggagtcttcttggttaaaataataaaagatacattaatttttatagtctaaattataaacctactatacctaaaattatgtgattgtccattaacaaaaattttatttcttcggttatttcaaatcaactattgacattatattgaagaataaaggaatcacgtatttttctagtgattcccttgttctgagaaaataatgtcttgctttaacgacaatacagtatatgtgattattaatttatttgttctagttatgaaaaaatctattcctgtcaaaagagctttcttcaaagaaaaacttcctttttttttttacttatcctactcgaaaagtaaataatgttatttttcagataattatatctactatttatagaattacactgagctttaacaagtttatgcttatatattgattctcttatttattatcaccaatgttgatgaatttatgcatagcttattctatacacaaatagctttttgaattatcttttcagaataaataaaggagactttctcttttatgcactttccccttaccagtcttaaatttccctttaatcaacaataagaacaaatcttcaatatagtacatcttctataaaataaaaccatacgtaagataattttactattacaaataatgacatagtctgtttcaccttttacattatctaaaaaagaacttgtaggaattcttacaagttcttttttatttcctttattctcttcttatttacatacgcaagatttatacatttggtggtgatacatactatatttatccgataaaataatctaaaaattaatacataattgatcgttttaagaaaaagaaatttcataaatcttcaatcacagttcttagttcacctaatagaacgtataaagactcatatcatcttttgattatttttggatgttttattctacgtatattcgacacaaattgattgttttttatgaattttcttgaaaaatattgtaatatcactccattttttcttctattttgttatgatgtttataattaaattggattaggatttttttagaaaatgggggcgtatattatgagtgtctcagtaaaaggaaatgagcaattaacctctctattgaacgactggtatcgatctatgctatctcagcaagttataaaagctactaatctaaaaaagaaaattgatgaaaaaattaataagttaagcattgaaccgaatcaagagcatcaggatcaaaatttgttactatactattcactactcgaatttcgttacaaggtcttaacagatagccttggtattcaacaaaatagttttgatactattagcgattatgatatgcctacagatcaatttctacaattctattatcattttttcaaatccattcattccacttttatatcaaattatactgaggcagaggaacattataaactagcagaaaaaatattggtagctataccagatgaaattgaacacgccgaattttactatagaattgctactttctatcaccatacctataacaatctcgcttctatcgaatacgcaaataaatcgagagcaatcttttcaaagtacgaaggttatgaagtaaaaacagccttttgtaatagtttgctaggtggttgctgcatctatttaaaacagtacgaacaagcagaagaatatctacattgtgcaattgatttactacaaaaaaatagggaagaagattccttgttatacgtaaaaaatactatggggtggctgtattctgatcaaagtatgtctactttagctattcgtcacctttcagaagtaacagagaaaatccctacacacttcaaggccatcttcctacaagctaaggaacattataagttaggagaacaatcaacggccagccaactcattgataagggactacagatttgcagagagattcataacgaagaatatacacaccacttctctattttaaaaaaattaaacgaaaatattccattggaagaattagaaaaaatcattcaagaaggaatcttatactttgaggaagaagaattatgggaatatgttgtcgaatacgccgaattatttgccacaaaatgtagacaattagagaaccaccaaaaagtaagtgactatttccatatttgttatcaagcaagacaaaaatcaatcgcaaaaggagtgttaaaataatgaaaaaaattagcttattattatcaagcattgcttttattggggtattaacggtgggaatttttcagttttctaaaacagatcagcttgctactcatgggcattatcctgctccttcatatagtgttggcgattatggtggtgcaccaccacaaatttaatgtaaatgtatttaaaaaccctccaaatggagggtttttaaatggcttatctgcctgttcaatacgcatagagagtacatattatacttatttactatgttataagatttttcatttccactctgtaacaagattctagcattctctcctagaatctcaacttaaatcttaaatccaccaattaactcttgaagttcttccgccatctgtgctaattgtattgctgaagaatttatctcttccatagaagcatgttgttcctcagatgaaccagctatcgtttgcatacttgaagaattttcttttacagccatagctatttgatcaatcgatgtatcgactttcattgcatcagtagtcattgtattagatagttccaccataccatgcacttttgacacaatatcatttgcagattttgaaatctcataaaaactttgttttgtatcgttagcaactttaattcccgactgtacttctacgcctacttcattcatagcttttacagtctcatatacgtctgcttgtatttccttaattaaacttccaatttccattgaagattcggatgattgctccgccaactttctaacttcatcggcaacaattgcaaatcctctcccctgttccccagctctagctgcttcaatcgctgcatttaatgctaataaatttgtttgttccgcaatattttgaatcgcttctaatatactgccaatttgctgtgatttcttatctaataattttatgacattatcggattgagaaacagagtgatggatagactgcatttgtgttacagtttgttctactaattgttcaccttcattggctttttgtttagtgtatatggatgaagccgatacttcagaagcattctcagctacgtattgaatatttcgtgttacctcaccaattaattcagctccagactcaacttcattattttgaacctctgcactgttcgagatttcttccatctcttttgtaatttgttctgtcgcaacacttgcttgctctacactagcagttagttcctcagaagacgcagctacatgtcctgcagatgtgttaatttgagaaataatattacgtaacgactctgccattgtattgaaactaccacctaattgaccaagttcatcctttgaacgaatatctattttctcggttaaatctccttgactaattctttgagctgaaatgactaattgtcttagtggagtaattatagatttgagtatgaatagaattacaattccacctaacaataatgaagcacctattatagtgagcgttttataaaaaataggattggtagcttcttcaatttctttcgtaggcattacgccagctattttccaacctgtttttttatttgtcttaaagcttatgtttcgatcttcaccattgaggctataagtaattactccatcttctgtcttgtacaattcatccactaaagttttatctaatttctctccaggttttagtgatggatgaacaactatagttttatcttgactaactatagatacaaatccttgcttcccaatttttatcattttggatgtttttacgatatctttaatattcaaatctacgccaatgacaccacttttatctgcattctgctttgcaattgcaattaccatatttcctgtagactttgatttatatggagatgaaacaataatctctccatctgcttttactgcatccttataccaactgctttctagcggattaaacccttctggtatttttccaacaggtgcatgaataaattgattgttactggatgccgtataaatcgtttctatctctggatgtaactgtatatattgatcaaatttattctgtacattttgcgattgttcaggattataatccccttgtgtgagtacctttgcaaaatgagtgatatctgtatgcttattttctaattcatcatcaacaatcttatctaaaatacttatattatcttttgctgattgtagaattgtttcattaagatctgtttttgctttattataagatgatactcctacgataaggcttggtataattaatattgctataaatgccatagacaacttcgttttaagctttattttccccaatctttcttttatattaaacactagctacttctccttttcatttttactacttatatagtttatttaaatttttctcctttacttttccacattcatttatggtaccattcgaaatgaaaccacaattacatcctattatccgtactttataatttagagatttaattttcacagacagagttttatctgccctcctttcgaatatgttatttttctagattcagcaattattagactacgaattattccaaataaacttgatgcaacatatacttcatttaaaaaataattattggatttgtttggataaaaatctagtttagcgctaatccaatcggatgaaattcttaccataatacattcactaaacataaataagtaaatttatttcttttaatacttatatttaactgccttttaaccattctaactgtattatttcatcgttttatctatttattacaaccacttttgtattattgaatcactaaactataaattctaaataggagaataaaataaattagagaattacattgtaacacatatatataagttgttaatattaaaatttaaaactttactatttttcatatgcaatattacatgcgaaaagccataatttttttgttatactatgcatgtggatttttcatccaaaatccacccaaacgcatatttatgtatatgccaccctaattgatgaaagtgagaagagtgtttatcatttttctcacttttttatttaggctctgttaatattgattattgataaaaagtattaaataagggaagacaccttagagttggtgcttcccttatttgttgattattcaaatctaaaataggtattttctaaacctattctttgctttaatgttctgcccaaagcataattatttggtaattctttttcaatgacacaaataatataacctgcttttcctgttgttaaattagttagttgtaagtagttagtgttgtcgtagatataagaaataatatattcatagaaattattttctttatcttctctattcataccaacattgtacaccctaactcttgctcctacccaaatttcctcatcatcatcaacattacttaaaggcatccatttcgagttatccaatatttcacccttttcttaattcattcgtttatacacgaatgttgctagacacaaactatcataagcatccgtcatttcattgattagacgaccaccgacagagaaaaaagactcaacatagctttttacccattgaaacacttgctcttttagttatttttacattttgaatctacgaaaatgaattcccttataaaaactctaacagagaatcttccttccaaatttcacctagggaattatttgttttccaaaaaacctaccaacatctttatcaactcattttagaatatttaaacaataattccatatacattacctgcataaattattcattttcttttatataagacctacctttttacttttgatagattattagacattggattattatacataaatcccaaaaacatgcggtattttgtagaattttgtctatcaatatgtatgtacacccttttgtagtggatatagactgtgaggtgtaaggagataccttacaaaataataaaaaggagattatagaatgagtagattaacaaaattctcaaagttagtatttgcaactttaatcgcgggaagtagtctaagcacctttgtttcgtcacacagtgtacaagctgacaccttagatcctaattaccaagacaatataaaattcataccaccttctagtgctaggccaaaattggaacaaaaaaacactattgttccagaagcaaaagttgttaaaaaccattatgtaaagtactctaaagcacatttccaaactaaagaaagtataccaaaagagatttattattcttcagaaggctttaagggctatatacaggcaagtaccgtttgggatatgggagatcatttcgcaacactatattccggaaccgttattcgatgttagacttttaatccattctcccctaatgcttaaaatggttaataactcactgccaatactgtaatatctattgttcataaaataaaccacaaaatctttcgatttcatggtttatcaaatataaagataatgctaaacgaatactctaacattaccttccccaaagttaattatagagtattttcaaaaaaaagacactcttgtagtgtcttttttatagtattttaaaaagaattccacctactaacacctttttgttgcgcctattcgtttatttcaatataatacttttccatctcgtatatgcaatagacaatgatagctaaactccaactgacaccataataattatgtgtgtagaagtcatatcccgccttaatacctttctctattacaacaaatgtaaatcctaaagccacccatttgttaattttcatcttaataaacgttaaagagataattattaaaaataaaatatttgtaagatgatttatcattagctcatatttttgaatgtatactgccattatacaagcaacgatattagtcgcaatgccaaaggcaatcaccgctccccaaaccctgtccgaaagtcccactcctgagtcagtcccttcctaaacaaatatccctttctttaattcgttcctacaccctattcaagatatgctaaattatccttgtctgatgaatatctatttatcttttcatatagagcaaacaaaatttctacttataattttttctttattagacaaactatgtctaagccgtttgaactagcggcttcactcttctggtaatgagatagcacaatttattgaattgactaactcattcaacccactggcaccggcaggcaacaaaatagttgtctgccattttcatgtatactttttctaatttcattacaaaccaaatgtgtgctgtactgatttcaaaaggacagcatttcattttttaaaatgtaaaaaagataagatcctgtctacttttggtataggactttttcttttcacacatactatttttgaacctgtttaccgatacgtgtcctaatggtgtcttgaattcctcctaaaaagggctgcagatacgactgcatgcccttttatttacgttgctgctctatattgagtaaaataattaaaaactaaaaatgtaatattacatattttttctgttcagattatgttaagattcacttcatagtcgaattatggtttcgtatctaattcagcaatatgtgaactgtttacctaaagaaaagacacccaaaaggtgtcttttcttcttttaatctaaaaaacatttctcctatttagtaagatccaattagccctctaacctaagcctcatatttaaaggcaatttaatcatacactcaagagttttcatctatttcaatatacttataacttaatttccaatcacatttccagcactatatttgctttcttacagaatttctgtcttgttcttaattctgtcaaaatcctcatgtagctatacaaagaatatatgctactatgatattaagaaactatgcgttcccttaaccctgtatccggccctgtatttattacagggtctttgtttattttattggcttataaaggttaatacacaaccaatttcaattaaaaccgtttaaatgttagttagaatttgaaaaaatatatctattaacttttttaacaaatgtaatctaatattaaatttctaaatctatactgtactatacaccagttaacactatataaatagtattaactatcttaattgaatattagcaataataagtataaacattatcaatttactatatcttacatttatgtaaaaatagatgtatgttaagcttattcaaaatctttcccctaataaagatttgaagtagcatttcatgattctccttactgttaatatgccttgaaaaagaaccctatagggttctttttcttttcattataacctcagtaagtccttatttaacatgcaaaaaggactgctaattatttgcagcccttttacacgttaatatacacttgtattacatgctgaaaactttattatattaggtatttataccaactaaacatgccattatcatttagatatataacacttcaaagtttagaagtatacaataacaaatctttcccagcttccagctacataactagtaactgttaattctctaccaccatttgctgatatatatctaccattacttagtgcttgtaatacatatatcctattgtctccaccattatataagataaatttttcccatgccccaattgatgtacgatctgctactactctaccgtttggctcaaacgaaacgtactttccattactttttgcttttaaagcaaacgtatataattccccagtcggaattaattcaaatttctcccattcattaactgcattacgatttgctactacattacccgatggctcagcagaaacatattgtaaatttgctgcctgtatagcaactgtccaacttccattaaataaattcacgccttttagtgaacctgctcttgatagatttgctgccgatacatcattcgatggtgtaatcatcaatatcattaaaaccatcggcaacatcattaaaactaacttttttgagattgtattaccacttgcacgtgttatgaacctcttcattcccattcctcccttaatatgcatagaactcatatacatcataccaaatatgtaaaatattgtaacggaagaggggttttatcaataaataccttactattctgtttcttttttctcaaatctatagcacttaaacatttatcaattctcaagcacatttttaaaatcccccctgataaacaaatatagcagttgatagcaaggagagtatatacaaaagagagagtattttcatttcacttttctttaaataaaaaccaaatagccgttcataatgaacgactatttgcatctaacgaataattagaaggttcttcatgttaatctattttgtttaatcccgttgaagtaacttgataggttctttttttgcctatatattcttgtttattattctcaaggttaagaagtgtagcacgtgtcttttcctttactgcttccccttctatatgggtaaactcaatgtaatcccccgcttttaaggacaccgtttggatttcagcagtttgttgtctgtttcccactatttccttattatacacaacattaccggttgaattctttactgtaatacttgcatatgtctgattaaagtaagaatgtggtacgcctgcttctaaattcacctgcattttctctgttgtcctattataatcaacttttgcgatttctctatcactatatccttttaaagaccacctaaaatgatttccatctaaaaccgttgtttctggcattttttctactttcttcaagccttcttttgtaacttcgtacatgactttttttccaaaactttcttgtttactgctgtctacatttattaaagtagctctatgcacaccttctaggtgtgtcaactcaatataatctcctactttaactggaactttttgcgattcagcattttgttgtttgtttccataaatgtctttattgtatactactttccctgttgcattttgtactttaatactcgcatatgtctgattaaaataatgatgcggtacgcctgcttttaagtcgatttgcatttcttctgtcgacttattgaaattaatttttgcaaactcgaaatcactaattccttttagtgaccatgcaaactggtttccttctaaaatactagaagagttcgggatatctgaattaaaacctaagttatctaatatagattttagatcaggtaaaacacctattctatcattccacggatcttgagattttgttcctgtattcggattacttaagatatttcttaattcggctggtgtataaggagaacctcgatgttctttagcaataccttgaatcgaagttgctgctccagcaataattggtgaagcacttgatgttccactaaatgttgatgtatataaatttgtagtattttgacttggatttgctgatgttgtatcaacattttctccccatccatatacatctaatcgacttccataatttgaaaaccataaacgttgatgtggaacagttgatgatcccgccccaaccataatagcacctgaatccttgaagtctggactatttcgatttaaaatcttttttccattacgatctttaaaattatctaagtcgtttgaaccatttgcgccagcttctataataataatccctttatctgtaccaacacgaattgcatcaaaaatatctggatgtacttctacaggtaaatatttatccccatacccatcatacgaagcttgtgcctctaataaaagaatatctcccgcttgtaaattatgtacagcacttaaaatagcatccgctgtattataaattccattatccctaatctgggatattacttttacatttgcttttggtgcaattccaatatttccaatttgattatcttcagatgaaacaattcctaatacagaagtaccatgagctctatgctggcttatattttgtcccgacataagcttaatatttttattgactaaatcctcatggttcaataaccatccatattccatatccacaaaagttgtatccttcccatcaccacctttaatgctccaagcatgcgaggcattaattccctttggtgccgcttcaagatatccttgatttttaaatctagggtcatcgtacggattaacagataaatttggtaactgtatttcaggaggggtcaaaatttgtttttcttgtatataagcctcctctacgagaggagatgtttcaaattttttcagtaataattctatttctatgttattaggagcttgtacaatataataatttaataaattattagctgattcattagcaactgatttagattgtactgataacttttcaatctctatcggatttacagatgagaacagacgattcaaagtaagttttgtattttcggaaaataactgctttaaattgttatcataatccccattttttattcgtttctcaataccatcttcataaggtaagtcaatttgatttttaaactttacaattaatctttcttcctgtgaatctctttctttgtatgtgacattattagattcagcgtaaactttattatgaatactatcattttgtaggattaaatctgttcctacaaatgtggtcattgcaattgatgaaattagaaaccctttgaatatgttcatactatacccgccaatctatattctcttgagaattttttaatgcgtataatggttaagatttttatataatatatatatctataatttaacttttgtagtgaaatctatgactttattaataatcccatagaggtaacctgatatattcttttctttcccatatactcctgtttactattctcaagattagtaagtgtggcgcgtgtcttttccgtttgtgcttctccctctatatgagtaaactcaatacaatctcctactttgactgaaacggtttggctctcagcatcttgttgtctatttcctataatttctttattgtacaaaatattaccggataaattctggactttaatgcttgcatacgtattagtaaaataaggatggggtatacccgcttctaatttaagctgcattttttctgttgctttgttatattctattttcgcgatttctcgattattatatccctttaaagaccacctaaaatgatttccatctaaaaccgttgtttctggcattttttctactttcttcaagccttcttttgtaacttgatatcttgctgtttttccaatggtttcatttttgttattttcaaggttaattaaagttgctcgcgttttttcctttgttgcttctccttctatatgggtaaattcaatgtaatcccctaccttgacgggcacagtttggctttcagcattttgttgtttatttcccacgatttccttattgtacagaacgttaccagaagaattctggaccttaatactagcatacgtactagcaaaataggaatgtggtacacctgcttctagttttaccttcatctcttctaccgttttatcataatctacttttgcaatttctctatcactatatccttttaatgaccatgcaaacttgtttccttctaaaattgttgcttctggcattttttctattttcttcaggccttcctttgtaacttcgtatagggctttttttccaaagctctcttgtttactattatctacatttgtaagagtagctctatgtacaccttctagatgtgttaactctatataatcgcctactttgactggaactttctgcgattcagcattttgctgtttgtttccataaatctctttgttatagaccactttacctgatgtgttttgcactttaatacttgcatatgtactatcaaagtagtcatgtggtacacctgcttttagatcaatttgcatttcttctgttgatttatttaaatttactttcgcaaattcaaaatctccaatccctttcagcgaccatgcaaattcattaccttcaaaaatgtttggagattcatttttgatttgtacctttttctcaacagtttgatcaaatatatccgttaatacaatttttgcataagcatttgttggtaatgatatagattgactgattccattttgataagatttaatatcattaattacgttaataggttggcccgtcatattttcattgttataaatttcaattttccccttaaattgcggtgtactattttcttttagtttccaagatacatttaatttttcattttcataatatatagattggatatcaaaatctaattttcctatttcaggttgagtaggttgatttagcgtgaatatttttcctgccccaatagtagactgcgtattacctcctgctttgacccatacatattctgaagtagatcctccatcatattgataagtattatcatgcgttccagaaatactttgattattccaagaactccattgtttatcaactaattttcggctataaccatttttcaagcgcgcttctcgaacattctgtccactatcagcccagtcttcttgaaacattcctaaaccatgattaaatgcaacattagcaaccggaaagtccataattgcaatttgatgccatttattctttgttacatctttcatccattgtccaaatttagtatgaccattttcttgccatgaacgcattgtcattgtgtaccaattgtagtctttccaaccataagttgtttgaaccttcattcctgttccttctcctccaaagggtccagcttgcgaattcggagataagtattcggcctttattgcttctttagaggaaattggatcccataaggcaaaatgtaaagtacgttttccattttcatcaaacccactttgttgttgaaaaccagcatatcctccagcttcaccacctgcattccagttgtgtacagcccagtacgtataaggtggtgtctgaactggtgaccagtctatactaataatatctgaggcaggtatattttggggactcacataaactgctggagcagctgaatgtgttgcagctttagtgtgcaaaatagacgttccaaacatagaaaacatgctacatgctgcggtaattataataactttattaaatctttgctttgttttctgactaatcactaatctacatccttttctaatttttattattgaatactaacgtagtagagaaatctatcaaaattcaaacaacatccagtaattctttaaaatactggatgttgttctatctttacatctgattcttacatattaattgattgtaattgctttccataacgatagtgcaaatatccaattcgggtcaccatttccttgatgattttgaacagcttcatacactgtcccttgatgttctactttatccccctttgtatatgccttctttggatcccatttttcataagatacattttgatctttggtttttacaagaagaatttcactttggattgatgtatttccagctgcatctacagccttcactgcatatttatattccttattaactgttaagttttgatcagtaaacgtcgttccttgtaccgtttgaatcaattgtccatcgcgtaatacctgatattcttttacacctacattatctgtagaaggattccattttagctctacactgttagaagtaaggttgcttgcatataatccttgtggctgtgtgggagcttctgtatctggtttcggattaacaatttgatttactttcttcagaccttcctttgtaacttcgtacatggctttttttccaaagctctcttgtttactattatctacatttgtgagagtagctctatgcacaccttctagatgtgttaactcaatataatctcctactttgactgaaactttttgcgattcagcattttgttgtttatttccataaatgtctttattgtatactactttccctgatgcattttgtactttaatactcgcatatgtttcattaaaataatgatgcggtacgcctgcttttaagtctacttgcatttcttctgtcgatttattgaaattaattttagcaaactcgaaatcactaatccctttcagcgaccatgcaaactggtttccttctaaaatattatttacattaggcatatctggtttaattggattagaatccgtactcttccaaatctctgctgttaaaattggatatcctaatgcagctactttttgaatggtatcgttatttggacgtaatccccacttctcaaagaaaggaatcaaattttgtttggctacttttgatgctgaaatcataaataattgttttttattatcatcagtttgtggaagttcacctgaaggcatgtctctatacaattgatgcaatttaggatagaaatcctctccatacgctaactgtagttgccaaagcataacaagctttacaaaaacatcgctaatttcatcataatttttattcacttgttctagatattgaaatgcttttggataaattccacttttctctaagttggatggttgattaaatgctttttctacagaaaggctgtatatattattttgtacttctgtcatattataaaacttccagggcgattgttgtctcaaatgtcctgcctcatgccaagggccccaaccatctgttataaatttattaatatctaacacgtattggattgcatctcctacatatgctgttcgataagaagttgcatacatataataatcgggagaatgattttcttctacgtaatgaacataatgtttatctacttgttcttcggataatccagctactttgtcttgaattcgagtagcttcatccatcttttttaagagttgtacaggatctgtattagaacccaacaaatatttcttaacacgtgcaaggctggccgtaattaatacacgttctccttttaactccactgcatgtgcattaggatattggtccagcatgtttattaaatcttgtttcgtatgctttcctagttcaaagaaaggcgtagtcgttccacctgttgtgattgttgttcgaatggtacccccttgttgtttattataaaaataaatcatccccccacttggagattggattgtgtttataccaggttttaatgtaaatgattttatcttagaatcttctctccaagaagcatcatacgaataagttccaatatatacctgaatatcttgattaccttctacattaatcgttatttgttcatttggctttgcatataaaccagttggttcatatggactaaatgccatactttttctttcctgttgtttcagtacctcaacatccccttttcctgggactgtaaatgttctattttctgatttaactgacttttctttttgcaatgatgtcgataaatttttttgctgctccttttgctccgcaaagacatccgatgaaaaaatcattccagtcgcaagcatagttactgtagcagtggccgcaagtatttttctagttttatgttttgaattattccccatattatctccctcatttttccttagtactcttaagtttttttgttttcttctccatgtttttacaatctaaactattcatactatttaaattgtgtctattactctatattttttcataaatatctccttttctttatgtattattgtatataaatgttatttgatgacacattaaataacaactttacgataaactcatcgataacagcctattatgttttgattctgtattctaaacttccatccaattagagaaatatatccaattggagaaataagtaaataaattacaacatttaaaggttgggatctcacgaaaaattcataaattttttttactttaaaggtttaaacaattgtgaccacatttgtttgaacctccacaatttttttctaagctattctctaaaaatcttatttttcgttgtaaataaacctgattggtactctttatgcaaaagaaaagatggaatctttaattcaactccatcttttttcgaaataaaaagcatctaattctatttgaattagatgcttacatttagtccttaagcctaatattctaaactatttacgcgtttgtaaatctttttttattacatcccagagtgaattatcttgacgcatcggtttaccctcttcatcccattttattttttctgttcccaattcataattcatccctgtccatgtgtcttcacggaatgcatagaatgatttatgccatcctttttggttaaagatagaaataagatcttgcatgtattgggtagcacctggaacagtacggttaattccaaactcctctgcaataattcgattagatggtacatgatttttcttagaccattgttgaattggcttcaaaaatttctctaatccctgcttattccacattacaggtttctctaagtctcctacttttactaatcctggatattgatattctttatttttcttttcaccttgactcgttaattcatatggttcatacatatgaaatgcgtaaagcgtttttttatcctttactggctttaagtatttaaaggcccatggagtagcatataaacctgaatctaaaataaccggtgtttcttggtctacttcacgaatggagttaatcaccttttcataaaatctgtttaaatccgctgtcgttccctccacttttgcataccatttctcgtaatcttccgtccaaaaatcattatatctattatttttagctgtttctggatgtggttcatttataatattataaccaaccaccgcggggtgatcttttagttccagagcgaggtccttccaaaattgacttgcttgttcttgatacttctcttcttcccatattctgtcgtcattcttattattattaaattggcgccatcgatcaccaggtaaggataacattgtaagaacgactttcattccttgtgattgtgcggcatctaaatccgcctttaatttttctagatcttcctttactaatccccgatagttatctgcattacctatcagaaaatcctttccagaagtatctggtttatcctcaaatagaaaatctttatcttttacccatttatcaggtgctaaacgtacatattcaatattagcttcttttgcacttttatagttttcaggtaatgacgtactattcatgaaattagtaccctttcttttcgaatcccaaaaactaatttttgaatcgcccttgtggtatgtatcagctcttacattcatttcctgtactccaaaactcatcatgcctaataacgcaacaattggcaaaacttttttcacaacttttccttctttctctttatatttaacacacataacatacctttgttttgttacaggaatatggcaattttccaaaaataccttttaaatttatacattggtagttcattcataaaaaaagaaagagataattagaacgttgcttcattttaaaagaaacaaaaaaggaatcctttacggattcctttttgcaatgcactctttttcaaatggtacattttgcacctacttttagtataacttataattcctataaaataaataagattaactgaaatttacttcaaattgtgataaaaaacataattaagaagcgcagataactaaatatcatccctttattaaataaaaaagattaaataattccccctccaaactaggacccctttacactttttacaaatattgttataattagataaactaaagcattatcccattaacaaagggactccataattggagtccttttgttaattagctattaaaaatgatagcatgtgattattgtataatttcttccttttttagatctgcatattcttctacgaaatcccataaaccttgcttttcgaagtaagaaatacttttttcacttcttctaagagtttaattgcttcatcttcattaagagaacgtaaaatattgaaatgatatacatactcttcatttcctaattccatacaaactgctaatcctttttcaataagttcttttacaatatttgtttttcttagcttatagtgttcacgcgcttgtaagaacactgctttaaaatgggcaatattcttctctgtgacttctgataaatgacgaattgctaatttagataaattttgagttgcatataatagtcctagattatgccttactattaaaatcaatttttcttcattatgtttttgcaaaaggtcaatggaacgattgaaatgttcttccgctttttcaaattgctttaagaatatacgagctgtccctaatgcggtttcacaagaagcaactttcacctcatatcccattagccctaaatacaaggaatatagatacttattttactttcaaaggctgaaaccttgctgcataactactgaaaataaagtgaaaagacgttcaaatccatatggatagatcgtcttttcactttatttcatacatatactgatttttcacttattcattttgtattgtacttaaaaaaccaataaattcatcttcatttacaggtttactgtagtaatagccctgaattagataacatgcattacgttgtaacactgttaattgttccttcgtttctaccccttctgctatcactttcatgtttaaagtatgagcaagtgaaataatggtttgtataatttcatctccatcagtagaagttccaatcctattaacaaattctcttggaattttcaaagtatcaattggataaagaggcagatacgctaatgaagaataacctgtaccaaaatcgtcaattgataaatgtacaccatatgattttaatgcttttaacttcgataaggtttccttttcatctaccattgctattcgctctgttaattccaaatcaatcgaattagcaggtactcctatctcttctatggtagatataatggtttgaacaaaatctttctgttcaaactctatagctgataaatttatccccatctttagatttgaaaagcccgcagaatgccattctttcagttgttgacacgctttctgtaacgtccacttcccaattgaaataatctgcgccgtttcttctgcgataggtataaactcaaaaggagaaatcagtccaagctctggatgttgccaacgtattaaagcctctgcaccaataaccttacctgccttactatcaatttgtggttgatacaataaaaacaactcattattttcaattgcatttggtaaatcctgttctaatcgtaatcgacgagttactttttgagataatgtctcgtcatacatacaaacagcattgttacctttttcctttgcgctatacatagcgatatcagcgtgttgtaaaagtgtagtagtatttattcctccaaatggatacactgctattcctatactaagagataagtaaaaactatgctgatttactacaaatggttcttcagttatacgaaatagagttttacacaaatccaatagctgttgctctgtttggttatggacaatgatcgcaaactcatcaccacctattcttgctagaggaatagtcggtgacagacatgtcctaaaacgtttggcaacttcttttaaaaccttgtcaccaatcgaatgacccaatgtatcattaatagtcttaaagcgatttaaatcaatatacaggagcccaaacttatcctgtgttttttgtgcacgcttaatagatctatctaattcttgttggaagaatatacgatttccaatctccgtcaccgtatcatggaatgcaaggtaatttatctcttcctgttgttgtttcatccttgttatgtcttttaccattacatagctcccaaaggtttgtccttctatcataataggaactatagtgacataccaaaagagtatatctttctcattgttatttttcacacgtaactgtagtgaagatgaactacatcgtttccctttctttatagctgcttccaattcagatttatcttcatctaaaaaaatagagaagcactctttccctatcaatacagcactttcttttcctaataacatacttccagcctggtttatatttaatacgataccgtttgaatcaatcgttaaaataggatccggatgatactcatataatgacttaaatctctcttgattttttactaaatcattagatttatttattaaatcccttgttctttgagatactgtttgttctaattgattattaaacacttttaatgttttagttaactctttgttttgcattcgtacgattgtatgacgaatcagtacaaatacaaaagcaatacaatttcccgtaattaatgtagctgaagaagtttgctctttcaaagtaaagccaattaagactgcaactgcaagataagggaatataccaagaagtttctctccaaatgtcggattaataataaaataatttcttttaaaagaagtattctttgggattgtagcacatgcccatcaacttaagaatttgcactacccccaagtgtcaaaaaacgttattcgattttgtacatgcttaaacaagcgaaaatgtacatgtttatcttgacatttacactatttcttttactaacttttttttaccgaaaatatcatctaagaaacccattattccctctcctttccttttaaatgcagtatctttttataaaataattcactataatatcctatttatcatacactaaccaggaaaatatatccttattagaagaccaattctttattataaagaaaagatcaatctttaaaatcaatgtccaaaacaattgataataaagtttaaactattcctaatttactaacgcttaatttatactgaatcagattcattactcctctattaaacttataaaagctataaatatttacatgctttcattaatttttattttgaaatctaatgttttatttgtttgacctgtttctaaaatatctaagacatctcgtttgaatatcagttttaggtttttaattataaataaagaattaatttttataaattcaaattctacatttaattattaagcatgtaacataccaagataatatcttctattcatgaatatcttcctattatttattttaggctttattgtttttatacattttgtgttcactttttagaagtttttcacttcaaaagaacaattctacaaaaacttcatttagtcatttcattttaattttattgagtcaaaactattaagaattttgtgtctataactgtccacaacaagaaactctatttcgcttcatccacataaaaacatgatactatatcagaaaactttattattttcttgaatcgaagagactacattataaataaacagtgttattatgtcttgctttttacattcattttccaattaataccacatgaaattaataacacaaaatttcttatattgataattaccaaaaaccgctaccggttaaatataataattgttataatatattatattgataaaaagttaaaggagtgaaaaagtggtatgtttagcgaattatctattgaaaccataagtaaattttccccagtcatcgtggcacttctaggtgcaattacagctgctttcatatacattattaatcaatttattaatgtaataaccacaagcccgcttgataattattttaaagataaatctaatcaatttaaactgaaattttggttttataccatcggtatacttatgggaaccattgtgtattttatttatggcattcttctttatccagctttacatgaatatcgtaattctagcttattcattttaaatgcactaatatgtttctctttatttatatatttttctatcacactcataccaataaaattatttaaaagaattattaaaaccaaatggcatttcaatttatttatttttcatgtattaactagtatattatttttctcctcagcttcatggggatatattgtaaatgaaaagtatttagatttcttatggaatatgccacttgttgcttttctattcagcttattttatttctttacacttcacaaaattactacagctaaagctaccaaatatgaatatgatatttgtcccattactgaggaaacatttagagagatagataacttaaaatacgactatcagatggatgagaatagattagtcttctacaatgaattagaatcaagcgaaaaaatattttacgtatatgattcttcttcgaaactttatatggagtgtaaaaaattagttaaaacagagataacgtctgaacccaaaaaagtccctaagaatcgcaggactaaaatcacaattaatatagaaaaaaactctatatgactaaagaaagccgcaattttagaatcgcggctttcttatttctaattgtctattataataaaagaaatatttatactactatcggcatatattcctaccatattttatatcatcacaaaccattatttaaaattccaatttcttatttttcttcaccaataatacagtccacagtagaatgggtattgtatcaatttttgattttatcaaacttccacttcaataattccttcgaaggccactctttttgctgtattggcaatctaattttttctctgtttatactagagtcttcataattaagaagaatagttccatcttcacagattttcaagtctccacggtcaaatgctatttcatgattcgtacataaacaaatgccattttcaatgacttcctctcctccttttgcagcatctttaatatgagctgcacgtaaaaaaataggattagattggccacaaaccgcacattgattctcatacgcagctaatacttttttacgaaaagctttctgattccccctataaactttcttatatttcgtttcgatccattcttttccattgtaaggcatttttttacgaatttcagattctgtaggaaatttaatgtcaccattttgatcatatacagctattggaatcgttgaaaaacgatccattgacatatctaataaagcaaaaccaatttctggtcccaaataaactcgagttctaacttcatcaacaacattatgtatcatcaggtactcaatagggaaattatatccatcagggcaagaagctaagattgatggctcaatatattggtttcttttttctcttttcgctgcattattgaactctattaagagtctttttggtaaaaattttatacctcgtttcatatttctcctccttattaacttgcagtttagattggcacaacatactattgaaaatgattctaactaagttgtttttcggtagtggaaaaaatcaacaatctattctaaagaaaataaaaaactaattttcacttaataagtataagttcacttatttttatatcctaaaatccaatatcgtaatattgtttaggcatccatccagaacctttaatagacgatgcataatcaaaaattgttttaaaaaaacccgcactcaccttactatattacccttttttcatgataattgtttccttaagaggatggttactttcaattagatattcattccgtttatttagccgctctaacagagcttcatgcggtgctctaataaatttaccattatgttcgtccctattacatttttgacaagttaatactagattccatacaccattcaaatccatgtcttcagttgataaatattgcacagagagcgatataaaacgggtgatgtattatcgggaatattataacaatatcttcagaagctaattacaacaatctatgtttaaataatatattcagtttaaaacattttatattttgattgattaacccgtccaatcttacatgatataaaaattttaaactattaactacgttatgtttgttgtaaaaccattagtattacttatccattagaacaattgtttaaaaatataaactttctctttgactaatataatcgaaaaatttaatatttatatataaatatatacaggaggaattattttgagaaaaagattacatcgcaaacgtttaacattactttctaagacaaggaaatttgatcgttcgccttcaagagtagaagaaagtaaggattcatctatatttttgacccaagctgccattatagtgctattgttaacttttttatcttattcatttgccgctctttttaaaggtggatatcatcagtattttcacttaaattcgctagcctttcttaagtgtgacacaaatgacttaatacatttctttttaggtattttctcatacatagctggagctttattttggtattttgttattcttttcagctgggttttaccattcaaattcacactaccttcaaaggcattatacaaccaaatacattctacaatcattatattaatagctatgtatatttcgctttcattaatatttgacttacaaaaccattggggtacacaatttttattttttggttctttaatgatctttgctttctatggtcttttacctaaaaagattcaaaatgtactaaggcatatcgctacgcctttacattcttataaatatttaacacttattaccctattcatattttttggactctcagcccaccaattaggaataaaaactgcaaaagagcaaaaaatttatttaacatttaccaaagacaatatgaattacgtggtgattagtaataacgataataatttaatatcagctcctcttaacccagattctactattcgcccttattttaaagtatattcccaaaccgagaatatactttttaaaagcgtcatatttcctaatggaataaaagttgaaacacccgcaaaaatgaagtagtttaaagaggttccaaattctattctaagaaagaatttggaacctttttaaataatttaatagagattgaatattttttaatccatctaaaaattaccaatataaatgtgatcaagtacttcatttttatttaaataaactttcgttactgaataataagaaatattcaactcacaaatagaaaataactttaattaatactgtccaattgatggagataagaccattcacaacttttttaaaatatataggaatattaatttaaataaaccctattataaataaattcaaaataacccctttacctatttttatgttcctatctttcaaattgaagatctaattgttcttttatgaaatcattatattcttttatttccactaataaactttctattttcattatttgttcattattaccaaactttttaattagttttactcccatggatatatattttggcagctctaccatataactattcttcatacttgaaacgtggaaaccctcaatagcactaaaaatatattcaaataaattgtttttacctaatagaaacagtccaatatttccagctccatttttttcaatatattgtccccactctacttctgtcttaggagaatgatactgatcaaaatattcttgtaatattttatcacttaaatattgagtagatgcaacaaatacatgaattaaaatttccttgtcttttactattttttcactgtttatatcactaaaataataatttaaaaattcttcaaaatcttcttttgtatcaatccaatttttaactttcttttttatgccttcttgatcactaaagtctttccatttagaaaaaacttctttagcatcaatttcatcaaacactttaaaataactaacttcagaaattttttcatatgcatttttaattgctaactttaaaattttcaaattataattattatgtaaataattataaatctttaacatgaatagaatattggaattttcccaatactctacaggaatttcgcgccctttcgaatatattttttttgctatcaactgcgctaagtaaattatactttctttggcgtttctattcccacttatattatgtaattcttggtatgatttcaaaagaagtgtaaatattttttctatacactcatctacctccgacaatctatgttccaacttctcatttacttctttagcactatattcttttattaaatctaaatatattgtttgtatttcagttagatctttttctttaatcaaactaatgaaattacttaattcattttgagaaatagcatctctagggctactatacataaaataatggttaaaatacttgtctgagcaaaccctcttttccttttcccattcttttttatttgccatttctccttcaaatgcacctccaaatagacgtgttgcataagggaaaattgtgcatagtatcccctgatattcatttaatctgggtaacgctttaaattcatcgtctaattcaaacttgtaattatttataaacaataatttattagtatatatatattgatacaattccggtgaactaacttgaattaagattaaatacagtaaatccttaacgttcacttcttcttttaaaaatggtaaataaaacttcaccaaattaaagtatctagataggtctcttaatgacaatttttgctctattaagctatctataatttcagtatattcctcatttaaaatattattttcctcaataatgttatttaattgttttttgcataagttatataaatcaataaaatctggcttcggtaaataaataggtatttgtataaatttctctatatatttttttgcatcttctaaattccctttttcttcaaattgataaactgatgataaagatttttggacaacttcctcatctaaagctaatatataagttacctttggaaaatcagctaccaaacgtactagcttaaaaatcattctaatttctgacccctctagtcgatcaatatcatcaatatatacgactattctttttggataatctttaagcaacatttcaatttccttttttaaatcagataaactatccgtactctgacctggtttaaatctatctactagttccttaaatgagagtgtcgctccaaaaccacgcaaactaacagaggataagatatcagcatacttttttatcgctttaccaatttcaggattatatccttcaacttttttgattccttccaaaaactccaataagtaaagccgaataatatcatgattattttcaccaaaataccatggtttaaactctataaatattacatgattcttatcacttttctctttaattaaattatatactgaacttttaccacttccccaattacccaaaatccccatcgttaagctgtcttctccacttttaactaatgaattagctattttttctgcaaaagacgctctatttaaagcatcctgctctgtatcatttatcggatattcagagttgtaataggcttctattttgttttctttttgaagacttttggctattttctctttcttctcttgtttagatttttgtattcgcgctaaaatttcaccagtaaaatataaaattatgcaacatgaaaaaaccatgcttatatcgaacaaatctgaaagaacatttcctgtccacatgctaacaggtgtgtttacaaaccaataatttattattatgctcaatgatacggtgaatataatataatcagatagcctaaaaaatgtttctcttctgattctagcattagaaatactagtaataatatatgaaacaaaaaatagtattaatggtatggtaataagaacatataatactccctttacccaaaaacttaagtaatctgacggaattttatcatgcatttcatttctcaatattgtcaaaaaaatatttatacatataaatgataaaattacactggatactctccaactatttttaattattttttttgtattactttcttcttccattataaaagctcctcttttatatgcttaccaagtagtttttcttatttccttggattcctctctcccttgtttttataaaatacatagggtaataattaagtgtttataataagagacatacaatcactaataaagtattttattatttattaagtactcctcatgcaaaaaccaaaggggaatttcaccataggtattatacaacacttgtattctatactttttaacaccttcaacatttcattacaaataaaaccaagaattaaaaattctttaatatatctcagaataaatctttctgtttaattaaatatttactatttcaattaccccaaaaagaaggaaatctaattgaggtaatttacaatatttaagtttaatataaagatgactagatgtttgttttatagccaaaattaaatttaaagtagtattaacatgtctaatttaaagtaaactgatatcagattattacaaacgatgtattccgaacaattattgtatccttttactaccaataatctcaaataaactatttcaattcagctaaataattgattgactcaagattaaaatttgcactaatactaccttgataaatttttagttgtggtgtatctgttttcaacccaaatactcgataaatataaaatgcctcagttttttcttctgaaaattgcacttcgctactcgagataggaaatggaatattcgcttcattaattgtaccttttacttcaatatacttctctttcccatcaatctcataagatagaatatcatatccaagaccatcaccttcaatttgagatatgcgatgtactttttccgccaaatgtgaaaatcccatattggtaaggctctctttttcgtattttaatactaattcttcagcagcgtcacctattctccctttaacatctgcttcagcgacataatctcgcttaacaccatatcgatttcgaatagatgatcctctctttattattttattagctgatatatcagaatctgtacttagctcaagttttttcccttctactactaaatcattatcagtaatttttatggaagtaattgagctttcatattggtcatttaaagaaacataaagtaaagcctgcattccttttacattcaaaataggtacttgtttatcataatgataaatatgttcgatattatttgtaagtgaaataggccttaaccctttaatgtgaaaatacgaatagattatcattggatttttagctgttatatgagtaacccctgctagatgtcgataatactcagggattaattttacaaattctggttgagcagcaccggcataatctctatcatatattcccacaagttcagcttcgtataataatttagctttacggctatagaagattactctggtggtcatattgttagctaattgttgttcaatgtcttgcttgtgcttcaatgagatacccgcttgatctcgacttgtaaattgcccccaaatcagttccccattattgtttaaaccagtaatttcatgttgtctgatcgtactaacaaccttaggaaatccttcattaacatcattgaatttaatgaataaatgtttaacaggtttttgaccatcgttttttttcattatttttcctcctcatctactttttgtataccaccttctatatcactcactatactctttttaaattcccaacgcaactcttttattaaaaaataaaaatctctttataaaaaataaatacagataaactaataaaacccaataaaataaacgtttttaataaaatctgttattttaaaaataacatttcccataaactataaaacaaaaatcctttaccgcaattatattcaaaacatcgtagaatctccttcttaaactaaaataaatgctaacagaatatcaaacgaatataagggaatttttatatctttaattcagttgaatttttaatatagataaaaatactcaaaaggggttgggattagtatagtagactcgttcattttaaatgtgaagacttatctaggtgtcaaagataaattacattcgctcttacaactggattttttgtgaaaaaaatatagatttgattatgattattttaaaaaataatattcctgagaaacataaggtaagtttattatcactgagaatatttggagaaccaaaggatagtctacacgaaaaccattacaaaccgtttcattcgtaataaaacagttatgagcgtatataaatctgcgcttataataaccattagatcttttaatttttcatatacgattttataaatccctcaattcaataaattcaaaatacttaaatctttttattcaatacgaatctgcaattcttctcaaataaaatagctgcaggatggatttccccttcatgtaaactttaaaaatcactttatttggaacgataacacaagcgagtacgaacttttcacatcatccccagaatataaattcattatttttattgatacaatatatagatcgtcagttttaactatatagttgagaaggaatgcctaaaaaaagaaggaggatcatgatgaaatatcaaaccttatttcccttattaaaaaaatctctttttatctttatcctttctttcagtatgttaattttcacactccctccctctaccattgcacaatccaataacaatgtaatttctgttacaaattactatgtatctccaacaggaaatgacctcaatcccggtacattagatcaaccttttgctaccattcaaaaggctgctaacgtcactaaagaagaaagtactatctacataagaggcggagtttataaccaaaaggttcgtgtcactcgttctggtgtctcaggcgcacccattacttttcaaaattaccaggatgaaaaagtcattctcgatgattctaaggtcaaattagaagatgatggattatttacaatagaagacaaaaattatattcaagtaaagggattagaccctatacatacaaagttagcagtagtcggtgatgtaaatagaagcggttcaatcgttctagccgcaactccacccttaaaagcattgggtgtaaagaagaatgtatggtttggtatttaagaatgtaaatcagactgtatttggtactatggaacattatcccttatatttttcattcctactgctacttatgttatttctaaattaatatgttcataattaaaaaagagggtgctcgcagctccctctttttttagataattaaatatgctctccatgatccataaacacttcaatagtttcattttgtgatacgtcttttacattagtaagaccaaaagtaaaaacagcggataacatcatcattaataagattgcttttttcattttagcgcccttctttctatactctttttgtctgcatctaaagcgatgtgtaaatacttgctggctttttcgtgattttctgaaccatagaatatattacctaaaagataagcatattcttttacccaatcatataattcttctttttcaaaatacgaaataccttccatgaccaccttttctaattcttcttgtggtgcatagttatgtactgcttttaaaatttgaaaatgatgacgataacataagtcactaatcttatagccattctcaatatattcattagcattatgattatgacctaacttaaaatgttctcttgctaaaagaaacatcgttttagcgttgttttctagtgattcctctaaatgcttaattgctaactctgacatgttttgacttgcatataaaagtcctaaattatgcttgactcgtttaataagaagttcatcattagatttttggaaggtacctagtgctgaaagtaaatattcctctgcactttcgaattcatttagtcgaatgtgtgccatccctaaagtatttaagcatgctgcagtttttaattcataccctggactaattgaaaatacttcattcgcctttgtagccaattgaactgctaggattggtttcaatatgtgatagtaatgaactgcaagccaataattaaattcagctttttcgatttcatcatgcatgtactctaaatatttttcagcttcttcaaattgcattcttgcttcactatggtttgctgtattagtagcataaattgctttaaataaatgatgatagtactctaaaaatgtttctgtaggctcttgtaacggctcaattttatccaaaatatcttttgaactatccatatcacgaattagcagattataccgtgcattcaataaagcatagtagactaatattgtttggtcttccttaatattattgattttatctgcaatctcttcttttatttcattagactgtaatacactttgtgaaattatagcttgataccagtcgtttaataattttgtgatttcttctttagaaataatttcaacattcatatacgctacccccttttattaaaggttaccataacatacttgtttatataaattattttccgaatattaaaacttgataaattttttcagacactcatattaaacaatgttaatttcagatttattgaaccacccccactttaaataaatatctgttaatcttaccaatcaaattagtacaacagttaacatgatacacagggaaactttaattgaatagaaaacatattttgaataactctccttaaaattagtatcagtatctctcattccctcgtctaccgattttaatatccatatttctttaagtacacgtatatatgatttgattttatacgaaaaaccatgaattattaaaaatttagtttcagatagaagacgtagaccataggagttgatgtcccttaacccacaatacattcctgtttttttattgatacaagatataaatcgtcagttttaactatatagttgagaaggaatgcttaataaagaaggaggatcatgatgaaatatcaaacaatatttccctcattaaaaaaatcgctttttatctttatactttctttcagtatgttaattttcgcactccctacctctacctttgcacaatccaatagcaatggaatttctgttacaaattactatgtatctccaacaggaaatgacctcaatcccggcacattagatcaacctttcgctaccattcaaaaagctgctaatgtcgcaacagaaggaagtacaatctacataagaggcggagtttataaccaaaaagttcgtgtcgctcattctggtgcctcaggcgcacccattacttttcaaagttatcaagatgaaaaagtcattctcgatggttctaaagtcaagttagaagatgatgggttatttacaatagaagacaaaaactatattcaagtaaaaggattagaatttcgtaacttaaagtcaacgaaagttaacgaaacccctattggtatttatatcactggaaaaggaagttacattgatattagaaataattatatccatcacattgaagcgaatgtaaagaatggaaatgcacatggcattgctgtatacggtacttcatctagtgcacaaaataatttaaatcatattgtcattgataataacgaagtagcaaatttgaaattaggattgagtgaagcaattgctgtgaatggaaatgtagattcttttgaagttaccaataacaaagtgcatgataacaacaatattggaattgtactgattggacatgaaggcgtatctccagtagctgctttagatcaggcacgaaatggagttgttcgtaataacattgtccatcacaattcatccatcaataatactagttataatgaatattcagctgatggtatttatgtggatggtgggaagcaaattatccttgagcaaaatcaaagctatgaaaatgatctcggtattgaagtagctagcgaacatgcaggaaaaagcgcaagccgtattactgttagggacaatacaatatccaataatatcatgagtggcattgcaattggtggatatgatagtcagcaaggatatgctgaaaataatacgattacgaacaatgtgatttataaaaatgatacaaaagatcaagagagtggccaaatcgaattaaattacgatacccggaacaatgtaattaccaataaccaaatctatgcaggtaatagccgtatttttattaacaataattttaataaaaacactgggaacaaactggattacaatcattactatggtgaattcgatcaaagtaatggcttatggcaatggaaaagaaaaacgtataaaggctttacatcttatcaagcaggtatgaatcaagaaggaaatgaacaacatagtgtatttatcaaattaccctcttccctcaaactacttttaaaataaagcaaatgtactaaaacaattttattccagctcacttcatctcccctctcctataaaagtgaaattaaaattaaaagttgtagtttcaattaaaactacaacttttccgtacttatatatgaaattgaaaatatacacgtgtatttattccaaaaatgaaaagtgttttgggggcgtattatatcacaaatgatgtagaaaaaatcatctcctcaaatccatataactacgaatgattcttattcattaaacttaattaataggtatatacttcttaaaccccttacttatagttccattataaccatttttatcgaaaaatttatgtgcttctgttctagttgcactacttaataagataattcttgtagattcccttgcaattgacatctgctctacatgctccaataatttcctccctattcctttgcctcgaaaatcttcatttacaaccacatactctaaaacggtatatggtctaaattgatatccagggtccagacaaaaagtcataaaaatacttcctataacgttacaattttcctcataaacaaacaaaaaattattagaatcctttcttatttgttcaattctttctggtaaaatcttaatgtttttactatggggtgctaatttcttatatagatttccaattacattactgtcctttggctcagcttcacgaatcatataatcacctatctttctaataatattgacgtatcaacagttgttatctcagtatcttcaagaacatcatgtaaataagcagtagctttctcttcggccgtatttacaaagctagcaactgcctcaggatgtttgatatagtccacacccgctttatctacttgtccaccatgtgcttttttagctatctcatgagctatctttatataatcagataacatcgcaaaatctccctttcttcaaacaaaatcttcccctctagcaagctgttctaaaagtgaaggaggaaaatattgatataatccctcagcaaatcattggagttcatcttgaaacaaaaaatttataaaaaatgccatcctctctgtatatttctacaaaaagaatagctttttttggttatacggatacaattttattttaattacgcccttttcctttacgggtatatactgtattaatgaagaaaattagtccgcagataaagaatagaaaaggatgcacccatgttctaaaattaacaagacttataataagcattataatgcaaaggatacaacctataatatcaatgctaaaagataacttcctctgttaattctttaacttcattcatttttacaccataatccattaatttctttgactaaattgctgcataaaatacaattttgtttttacatctttaaaccaaatatacaaaccttttttacctctagataaaagcactctgtatatgttcattactaattcacttacaacatttgttgcgttcacattttctacaaaattatcgatttgatattgttgtccattataaatgactgttctattatatttattaaatgtaccaccataagctcttgctatttcatttataaacgaattgtcgtaattatcctttaatgtgactttccatagcttacttgtagaatcgtaatatagatcatcccaaaagattagacctacataatcaaactccaagccttgagccgtataaatacatcctacttgctctaaatgattaacagctgtttgtttataccattcatattgcgcagctaacgtcggattccatgcttttacaaattgggtctgtccatcccaaatacgaatatcatcaattttcttcttccaatcccaacaaaacggagccagccattttacactatatccttgtgtcattttatctttaagtacagtatcaatgtcatgtaatgaatcaaatacttgtaaatcatattttttcaaatctacactcttagataagtctcctgttaaaaattcatctacattctgaatgaatgtaccgctattttttgctcgttgctgagtttgcagtgaaagtatttcgggagtataccctaaagctctacgaatattatcgactgtgccttgttcagtaatttttatacgctgattatcatcctgtagtagaacaataatttggaatcttgaacatagattgctcattacatcttgaacatctgttaatcgatgtgactcatctattacaacaatatgtcctctatttcttaactttaatattgcgttaaccgttggcaatttagctggttcatctaatccatgttccatagcatgatctttatttagtccatcaataactgttctaagtgtttgaggaattgtaccaaaataagtgaacggatacctttttatgtattgtcgaatgagttctaaacctaatattgtcttacctgtgcctgcattaccttgaatgactagcactagcttatggttgttttgaaaagcatgtttaataagctccatcgctttaattttcacatctcgttgttcatctaaaagtgctacaaatcgctctccttgtaatgctttagaaatacctgcaagactagcttcactcattgaatagataccattagtaaataactcattgtcctgctttgcaacaggtttgttcacaaatgattcttttaagaacgagcataatttcttctcttcatctttgccaaaacaacatctcaaatagtttgcttcataaatggtatggggtggctcaaatagccgatttttttcagttaagttcggtaaataactcattgtacttaattgaatagcatttttcttttgaagttcactatgataacatctcagagacgttacatagtgatttaactgtgctgctggatgctgtcggattggttgtcgacttacaccaatatcaacatggtgtggatcgggtgaaccaatgatttttccccattcctttaattcaacaatcattacatgtaattgcgattgagaattatagccaattaaaaccgcatcaagtcttaatagatttccaggaataaaatattctaatacgattgatatttctccaagatctccttcattaagtcgctgcacaagtttttggacagaaattccccaagtgtccacttcttgctcactaaactcttctttagcaaaagcatttgactttaatccttctattaataaatcctttatttcatttggagttaatctaaataattgctttacttgcccaaaatacaaatgcattatagatctcctagtcgttagtcaaatttggtatttgttctaataatactatccaccttttttaaagatataatcatttattatatatagattatagagatataaagtactatttagataatttgttcattaccactttcttaattgcccatacatttcatctaactgagcttcaccttacaaatctcttgaagattcattaatccattctttcaattaagatttataaatgcaggttgtctacatttataaatcttagaagttaatgtattcatctatcctaaaatccaatatcgtagtattttttaggcacccattcagaacctttaatagaagaagcataattaaaagttgcttttaaaaattctgctcttagcttactattctttcccgttttcatgatgattgtttctttaagcggatgattactttcaattagatattcattacgcttatataagcgttctaacaaagattcatgtggtactctagcaaatttgccattgtgttcccccctattacattcttgacaagttaatacaagattccatacaccatttaaatccatatccaccgtggataaatattgaacagagagcggtaaaaaatgatctacatcacaggtatttggttgaccactctcaatagaaatacttttataacaataaaaacattttcctttttgatacccatttagcggttttcttacaaacgttaaatttacacgttcgtgagagtgtaaatacctctctggtgtaatagacttcaaaaagaagaattgctcaagctccccatcgaatctaacttctaactttggatttctttccgtccaagcactttctactaagttccatctaccttcaatctcattgaacaaattcgctctttgttcactttcattcaagatataaatactatcagttaatgtgatacctaacgtttttccctgaacagacttttcatagaacactgtattaagctccccattaggaatgttatgaaaagcatctattacattattgaatcctactttttcagtaacttgcaacaactgttcccatgtaattttctgtttattatacaattctagcgcattaataaacttggatgatgcactagtaatttgccttttgccattcccaatatgctctaacatatacttagcaaatatcggcgacaactcctcatggcttacaaaactattattactattccctagctctaatagtgtctttgcaaaagcaaatttatatgtagctacatttcttccaaacaagtaaacagatcgaaatttagattctaatgtttggtcattctcaaggaaattattcatgcaatgcccccttagtaattattagtcctgtacatcaataaggtagatagctttctcaaaaccacctcgcttttcttttttctccttacgaatcacttccaactcttcaagctttactccataagctcccaatgaagcatgaattaattctaaaatatctgcaagttcttcaacagcttcctttttctcaacagcttccttaaactcatgtgcttcctctatcatttttgtttttatttccattagtaactcatcaggtgtgagtattcttgcgttgtagcttagaccctcggctttgataatttctaaaatattatctcttactaatttgttatagataggcatgtttactctcctttatatatattaattatttaaagtaatcgtatcatgataattgccccatccaccacataaaagagcatgctactatatttaatcattctggaggaactttaaagattaatgattatgtttctcttattgaagaagatgcttctgaaggcaaaaaattttatattgtagacgagatcaaatcataactaatgataaatacaaacctttttgtttatcgacacagcatataaagatttacgaagactttggaatcgtaaaaagatgattagctgactatcctcctgcagactttggtcctctactaagtgcacattatgattatctaaagacatatgaaaaaatacgatgaattacaaggggttttatacactctttcctttcacgaatcacaaaattgcacagaaacacagactaccattcaaaataaattaaaggaattaaaaaagaaaattgatacaaaaacacaatgcctttctttcaagaaaaataaaaagaccgaaattggtctttttattcttcctcaccgaaaaacttgataaatctttttccaaaattactcaatttatatttttctatatttatttcatatttatcaggtacaggagactgccactgataaggcatacctgtttgtatgtaatcatcctgaaatggttcgtcaacccgctcctttacatattggaggattccaagcctaaataacttattatccatgtacctctttaaatcttccctttctttttctgcttctttttcttcttccgtgtagtccatttttaattgaatatttaacttcatcttttccggatttttcatcatttccattgggacaacatatttttcagtaaggtgaacaatctcacttaacctcatttcagctaagacatcatagtaatgaaatattttatcaaaatctagaatatcattatcaattatgtattcgaagccattcaatataatctttatcttttctgcttgttcatcattcattattctattaagaacaatagggaagacttcctgtttcaaaaatacttcattttcactttgatctaactttcctgcaattttttctatttttccttttagattatttaattctttatttatctttttaaatttaaaatgattcaatatggacccaatgacaggagcagctccaccaccgatttcaaccacctcttgcacaggttcttgcaatgaatctggtaaattttcacacattatatttattaattcttttatatccataaacgaacctcctaaatatccattcaattattaatataatcatatagtatttcaattcaaataaaaagaacgctataagccgattaatttaaaaataattcttccaatagcaattttcattttccatattaagaaaaattagaattcactccgtcttgaatctttgatactcttaaacatttaatttagactaatattttaaatccaatacagagcttttccagtctcctaaaagctattctttattctcttcaatatggtaacttattgttattaaattcaatacgtttatgtaatccagaatttagtttattttcattaattccactacttgaaaattcccccatcacctcttgatacgctgagaattcctcagaccgcttataatctgagtgatcacaaatattttctagtgatctataaacatatcctctaatcttatcctctgggatatttttatatcttacattttcaattgtttcttctgcaaatttttttataaatctgtttcattgcttttattccatctaccaacagtaaattgagtataaaattcattagcttcattaaagacttaaattgattaaattccaatgatttggtaattgttccttgataattatcaaaattatctttgttcttttttatttctctttttaatagttgatcccttttgtacaggcttgctgttatctttgtataaacctagggtttcccttttggaaaggctggattcactttcttgctttgctgtctctggatttgtttatgtaaaaaataaaattcacaaacaaaaaatcatcagaattcccaaggggcttgctgttacattctatcaactttaaatacaaatatattaaccacactcttaaaaattgatacaaaacaatctgagaacccattttttgataagtgagataaaatcaatattttatttaatcaaaacaaaaggaccatttaggtcctttttgttataaataaaaattaaccatttttactaattcatgaacatcaaagtctatttcagtcggtaaatatttactattatgtacaataatatttaaaaaaaatactggatatttttatttaatcttataaataaaaagcacctctaatatataggaactttttattgatttaatctataaattctttttaacagaacatttcttctcattttcaagttcgtcaatacacatatcgattacctcttgtattattctaaccctagttttatcagtatgactcataagatatgcaatcataataccaatgataaagaatactaaagcagtacctagtccataatagaatacttgagaaagtccactatccatttttggaaggaggtattttgtaacgtcaacaattcttcctgttactaccatactagcaaatgcggatgataatattgcgaatataaatgtttgaaatactagcactgtactatctttttccactacatttaaatatgctctaaatctttttaatttatttatatctctatgaaaatatcgttgtattcgttttttaataataccaatattatcaataatatcttttgaaacaatagaatttcctattattaattgcaattcagcttcaatatcttgtattccccctgtccatgcaaataactccatttcttttgttttcttatttaaaatttttttacgtatccatttgattgtctttactagaaaattagctattattatgtccaataaaagactaatgatgcagtataaaattagtctaatataattaatcccatttcctataaatcctcttaaagggtctaaaaaaacagagaatactattagtattacaaacaaaacaaatgtgactaaacacagttttttcatcattaaaacacacttcctatatattttaaaaatatatatttatatataacatataacaaatacataaatataatcaatatttctttccgctaaaaaatcgtttaaaatagaccaaattcgtctctatataaagcgaagatccttttctactatgctattcaagtacttccgttacctaagttgcatcccaacatttatactttttcttttttaagctgttcgattgctataaaataagttgaattcttatcgattgtaataatacaaagctttgaaacacaatactttaggaaaaatatattttaactcttttcttattccaaactatttattttattttgtataatatagatattcatatataaaaccatattacaaggaggcctttatcttgaactatggctggactggaactattgaacaatttaagcaattagatgtacagttttttattaaacaattgttagctcatgtttataaaaacaatacaaatgatccaaaaatagattctcaaaagagagcatggatggatagttataataaactacaagatttatttaatcgattttctaatttagatgcatcacttatttttgaatatgagattttacgcggaggcggtcgtcgcccagatgtacttttactgatcaatggttatctgatagtcctcgaatgtaaaagttataatagcgtttcaccttctgaatatatccaaacatctctttatatgcgtgatcttgaacattatcactcagctattcaacaatctaacatgcaagtcataggtgttttactgcttacaaactatgaaggcgaacgctggattttccaaaaagagtatcaagtaactctttcaacagttgatggattggaaagtattattaaacgaatattaaataaaacagaaacaccaactttaacgctagaggaagtaatcaatggtgtctatgaaccctcaccttctatgctagaagctgctcgttctattttaaataatgaaccgctccctgacattaaagctgtatcaagcagtaactttccagaagtacaacaaactgtacgctcaattattgaagaagctcaacgtacaaatacccatcatctcattttagtatctggtgagccgggagcaggtaaaacatatttaggtctgatcattgcacacgagatgaaaaatacagtttatttatctggtaatggaccattagtagacgtattacaagacacgctgaaaaatagaaccttcgtacaaggtctatatggatataaaatggatttccttgaaaagagaatgattccaaaagaacaaataatcatttttgatgaggcccaacgagcatgggatgcaaaaaaagtcgaccaatcactcactcgaagaaatcgagaacctcaaaacttaagcgaaccggatattataatgaatgtcacaacaaataataagccgtggagtgtaacaattggtttaattggtgacggacaagagatctattctggtgaagaaggcggtctcgctctatggaatactgcgatcgctggaaaaaacgtgactgttcactctaaacatcctaattctttatttacaaatgcagcacattatagaactcattctcagctacatttaaactcatctttccgtgctcatgcagctttaaaatactataaaattattaataccttattagatgctaattttgaacaaacaaaacagcttattcataagctaccaaaagaacattatcaactttttattacgcgtgatttagccaaagccaaacacactttacatcagctttatcaggatgatacaaaaacagttggcgttgtctgtgctggtggcgctgatcatcaaaaagaagtccctgttctaccaagagatgaacgatatgaacgccctagtaagatcgctcaatactttaactatgccgaatcccaatactattgtagagcgctcaactacagctcaactgaattccaaacacagggtcttgaactagatatgacgcttgttcattgggatgatgatctatatctacaaaatgggaattggaaggggcaacactatcaatggggtgttgaagatccattccaaattaaactcaatgcatatagagttattttaacaagaggtcgggatggaacaattatttacataccaccaaaacccattctagatgagacttgggacttattaaaaaaccatttacatattcctgaattaacgttttaaggcttataataagagacgatattctagactcctttagaatatcgtctcttatttttttattttataacaaccagagaattgttcttacatgccttaaaacattgcaagaaggagtttctttaaacaactagtattataagaaattgtcacttaagaagttgctgtttcttttattcccctaaatactgaatcgctttgcgatacttctccaatcgttttaggtctttatctgttatcctagcaagtcttgagcgatcagaattatgttttaagtctgcaagtttaactgtacgggcaagagaattttctttcactctgcacaaatactcaaaataaggtgtgtatttctcttttgtcagtacctgcactgcctcaactacgttatgaggtataccagcacttaacagatcattagcagttatctctgtatcttccagaacatcatgcaaataagcagtagccttctcttcgttcgtatttacaaagctagcaaccgcctcagggtgtttgatataatccatacctgctttatctacttgtccagcatgggcttttttggctatctcatgagctatctttatataatcaggtaacatcgcaaaatctccctttctttaaacaaaatctccctctctagccagctattctaaaagtgaaggaggaaaatattgatataatcccttagcaaatcattggaattcatcttgaaacaaaaaatttataaaaaatgccatcctctctgtatatttctacaaaaagaatagcgttttttggttatacggatacatttttattttaatttgaattacacccttttctcttacgggtatttactatattaatgaagaaaattagtccgaagataaggaataaaaatgggtgtacccatgttctaaaattaacaagacttataataaacattataatgcaaaggatacaacctataatatcaatgctaaaagataacttcccctttatttttttcatttataactattcccttccagatgccacctttaatttataattctcaatataataataacatacgtttcgatttttaactttttacatttaattacttttttggttctggtgcaacaaatacctttattgtgtgcaccagggtagcaagatagcaattaccgatgaaattaaaagtaaatctgaacaggttgaagaatccattacaaaaaagctaacgaagcaaaaataaacaacatatagatttgaattatatttctcaacaaccaaaattacttaatgtggtaaaataataattggattggcatccaataccatactacgttggttcaagtcgcagaaaggcaccttagggtgtcttttttttgtttgaaacacattctgccaaaatacctgtatcttttttgaattacgactcatataatccaacaaacttcgtatatataatttgttaccctaaatgggttgacaatacgaacagttataggaggattttgtgaatggtaaaaacagcatgtgtaagtatgattactggcattcttttaatatgttcaacaggatgtgccactcaaactgattctattacaactaaaactcaatcagtagatgatggcgcatatacaacaaaagaaatcacagacgcatttcctgtaggaacccccataactacttacattcaaaaagaagataaactgaacgtaaaacatatcaccagtattacacttacagatggtggcgtcggtagagttttggaagcaacagatggttttgttgttgtatgtgggaatgaaaaaggagtttttgatgtgttaacatttaaaactctggaagatgtaaagaaatatgaacagagtttaaagcgataattaatatcctccttatgccttttacacagacattgtcctcttgctcttgctatggccttttctaagtacagtataattgcgtcatgaatacacacacgttataatagtcacctaattacatattaagaggtgcagaaaatgaataaaactgaattaacaaaagtagtagcagaaaaagctgaacttacacaaaaagatgctgcagcagcaacacaagcattattagatacaataacaaatgcgttagcaactggagagaaagtacagattcttggttttggtacatttgaaatacgtgaaagatctgcacgtacaggacgtaacccacaaacaggtgaagaaatgcaaatcgcggcttcaaaagcacctgcttttaaagctggaaaagaatttaaagaggcagtgaaataattacacatagtcaaaaggctttccacaccccagctttgccccctacccttcgcatatcctgttttggctagctaatctggtttgttaaggggggaaaagagaaggagggcaaaaaaaagaatcctttaaaaatcaggattcttttttttgaagtatcgcctattgtaaagtatttttataagaatgtgtagtagaaggttatagcaaatccgattaaaaagagtaatgatacgaggagataaactctttttttgttatcttttgctattattttatctagtgtattgaactacccccactttcacttcgtttagaagtgagggattcctaagtaaagagttctatcgaactctaattgattaggctaaccccgcagtccttgcggttagaagccttatcgcttcatgctttagattgatacttgcgttaatatccctatcatggtgtgtacgacaagaaggagaaaatgtacatatttattcaagcgttaatgtacatatttaagttagcatttatagacatcagaaaaaaatggaacactcaattacttgtaaagtataaattacgaggattactcaaacatagatacgaaaatagcccttttaaagcaataaatgatttatacccaagtgagtttaaagaatgggagtttggtatgactcctttaaatttttggacgaaagaaaaggcattaacgattttgagatggatgattgaagaaaaaaaagggttatcgaacgaaaagctcttacgcgtatacggcaaaaaatggttggagaaaaacaaacttagtgcccctctggctatgtactggaatagtagtccgtttgcaatgattaacgatttgtaccctagtcgttttaaagaatgggaatttctcatgacgcccaataacttctggacaaaagaaaaagcattagaagcattgaaatggaccattgaagaaaaagaaaaattaacacccgaacaaatactggatgtatacagtataaagtggctaaagactcacagattagcgtctccatgtcaattaatgtggggaaatagtccatttaaaatgataaacgacttatatccaggtcgctttaaagaatgggaatttaaagttacaccagttggctattggtccaaatgtaaagcactagaagcattaagatggaccattgaagagaaagaaaaactggatgaaaaacagctattaaacgtatttaatcaacgatggctcataaatcaaaaattacggacacccttacaacgctattggaaaggaagcccctacgggatgcttattgctttatatccaaatcgtttttctaaaggtatgttaaaagggtattgtaataattaaagtggaaatgtaagtatgcagagacgccctttggtgtctctttttgaaatcctatgtaagtacattcttatgtgcctatcgctttatttatcgaagaaagtgaacctgttatattatttcccaatccatctcgtcaaagccataccaagaaacccagcgcccatccctatcatccacccagttttggcgcccccaaacatagatcccactcccgcgccaagaaacgtacagcccacgaatactatcccccgatgccccagttcggtcgttccatacttcatccccaccctttctttacaacatatactatatgcaagctaaaatttctagcttatgaactgttcattttctcgaccataactatatgtttcatatccattacttacaggtccaaatgtcatttttacatcaatgcgttacttaacttcattggttactttttttcatcttatagaagattatttctcaacacataacacatggaattatattaccagtaatggtaatataaaggtaccttcaattgttaactgttgttccctttttgaaagtcctgtcaaaagacaggactttttaaatttacttcctactaatttggctttttcgttaatatcctttcaccttgtatttatttgttttgttatctttccttaacaacaaataagacgtcgccaaaatcaaggcagcgcctactataattcctatacatttaatcaaaatcatttatcctcacattatttatttctttgcttccataccctattctctttacgaaaagtattctttccattcatgaagtcagctgtattaccaggaatgctatatttcttattctttttcttagacttcttcttcagccttttctcttcttggatagcttgcaaatccgccttccattgtttcaacaaatccttttcacgtcgcatcgaatttgtaccccttggtttaaaatgtgaaccagataattagattctacctattcatatggatatcctctaatccaatgtaccaagttatgtttttctttttaaatagaccaacaatatattaaaatattctatatatccaaggaggtttgtcatgctcaactttcataaagaattacccctattaggattctttttgtttttatacagttttattggtatcatctttttattactattcctgagcgtgtagtaacaatgcaatgcgtatacatatatgtttaatgtgtaaattctataaaagaagtaaaaagcacctctgctggatgattaatatatactatatattaattaggagaaaacatttggtataatataagtgctttattatatgtgttttcttcaaaacgtcttaggaggaaaacagttttttattttttcaatagtacttactaactatttctgttaatatttagttaccgatatgtgtatcaaccggcctgtgcttctgtacgggcttttttgatgcttttatgcttcgtaatacccaggaacctgtcttagtattcgggaattctactagattcccgaatactaagacaaacaaaagcctgccctattaactctataaagacaccattgcaaacataatcccttatagcttctatagattctcaactttttcataatatttatgagagtttttttatattcatatttctgtaacatctttatataacgttttaatatattatgtgttaaacttaaaacattccaagaagtcctttacttttagaatcgacaattcttcaatacccttagtcttgccctgcatcccctgcagggcttttatcatttagctagaattgataaagccttttgtagatttcttcaaccttatctgtgctgttatttatatctctagctcttaaattctttgtgagccacaagattttcttccgttcatattcatttctctgctatttatccgttattttccatccttaataatccgtttattgatgcgttcaataactttatccttagttagattttcaataataacctctattttcctaaaattcaatcaaatctttataaatttctaatgagtattaattgataggaataccacagcataaaatggaatttattctcaaaagttattaattattctatctgtcaaactattagtttatctcttcttcatattttaattgtcttttgaccacgatcaaacgaataaaatacacaagtaggtaaggagcattaatatgattatacaagaaaaattatctttttcagatctagattcattagattcaactacagactccataatggatgcgtttaaagatctttatggaatacttcctgacgaaattgcattaaataatgagacgtttccaattcataataagcctgctattactgaacgttatggtcatgcttgttataaaatgctgggcccttttatatttcgagatcttgaagaaccttcaataaatgaaataaccctaaaggaacaatttgtatataatcctaataatgaagaaaaagagattgtagtgataataaaagaacaatgggtcaatatacaatcttggagttcgaaatctattacaggtttaactttaaaatcagatcttattattgcaggtaaatttcaatcgggtaatgaatttaatatttcaacttttgcaggagaaagtaattcaaaatcaattcatacctctccttcaattgaacattctattaaagtacctccaaatagtaaaatgaaaattgcaatgataggaacattaattactgaggttctacatttccaatcaattataacagtacaaggcatgtttggtgcatgttttccacgtatggttcgtggacattatgttgggtttaaaagcgccggtcacatcctaaataaaacgtttggaataattgaaggatccattaacaatacagcaattcaggatattgaaataaatattaaagggatagaaccttattcctataaacaaaaagtgatcaagtagtaaagttgcaaagcaaaaaaatatactgttttttgattctatatcatatatagatcattagaataaggaaaatgaaaaatctatggctaacagtacttcaaaatcattgaatgggggaaaatcaattgtcaaacaaaaatgagttaagttttttcattattagattagtattagggttaactttttttgcacatggactcataaaatttcaagatggtattcataatacagaaaatttcttcaacagcctaggaatattcgattggcttgcatatccagtagcaattcttgaactagtgggtggaattttagttattctggggcttggtacacgaattatttcaaccttattttctttacttatagccggtgccattattactgtgaaatttgatcaaggatttataggagggtatgaatttgatttattattattggctgtttctttattttttgtagtaaataacagccaatctatttcattagataaattcctatcgaatcgtaataataaacaacaacaaactctataaacataaagtttctcctcaacacgtaaatctttattttgtgaagaagcttatttatatgaattactcaatttagatccgaaaaaagtaaaaagaatcccttatattttgaaaaagttttttcaaaatataagggatttataatttatttttaaattattgtataaaagaacttcaacttttggttacataaataccttcttatcttttttaaaacgctctgtatgcattttctcagttgttaataccactttctgtggaatcttatataatggtagtttatctttacagaactctcttaatcgctttctaaattcacttacactttcatttgtacttaatttaaccacagccttaaccatttgccctgtgattgcatttttttcaccaacaacagcaacctcctttactccatccattagctgtattacattttcaacttcagctggaaatactttttctccgccaatatttataatctctgattttcttcctaaaattttaatataatctccatctacttccaccatatctcctgtcataagccagccatcttgagtaaatggacttggagcattaatataaccaatcattgtagacattgatttgatctgcaacattccatccactactcttgattcaatattcttatcgcttagtttgatccacaatgaatcattcgatttagattgtgaatataaaactccatattctgacaaaccatacatttgtgtaattttaacatgagggaatatttcgtttattttacttagtgtagcctcaggcataacttctgatccataagaaatggtctgcaaactatttaaattatactttttataaacctcactcagtataagtagatttataaaagttggtgatgcgggtaaagcttgtacttgatgtttctcaatcatgttacatactcgattaggggtacgatcatcaataattaccaaacaccctgagctggaaatgatttggaatagagtattaactcctccaatgtgatcaaataacataaatggtataacacgttttgcactccttgcgacactgtacttcttttgaagtaatgtaaaatcatgtacaattgctttactacttccggttgtaccagatgaaaacaatactaatcctggatgttttaactttttcagttgtaataataaatcattttgaatgtaatccctttgtatattgattatttcaaagcctcccctttcaactttaattacattttctaattcaactatttcatagtattctttcttcttactgtcaaccaatgaatttaatatcggtactacagtacatcctaattcaataagtgctaaaaacattgctatagagtatggagaataatccgcttccaaagagactattgtataatccatctttctatgttcatttaactcccttgtataaatctttatttgatttagaaaccactcatatgtgtaagttttatcctcccaaactatagcttcgcattctttattcatttcaaatctttcaaataaaaaatcaatatgcatacctaacctccttttaaattttctcctttaattttttgttatgttagtgattttaattgttcctggcattctaaaatatacgcaactaatgtttctattgttttaaatgggctattatgttgtgacattgtatctaaattcaccaaatcaactgataaacccaattcatcttctaagccttgttcaatacttaccaataaagataccagccctaacgaatctaaatacccctcccaatcataaagatgtgctttcaagcctttttcaaggtcaattttattttcaagattttcattcacttcttcaacacagcacaatacgatttgaataaccttttctttatttgtatcttccaagtaaatacactcctttttataaatcatctttttactatgaagatttccttccggcaattgtagtagtatataacatgaacactaaatacacttattcttctactaataaagtttgtaagtatacgtagtagccttctctacttctcttaattatcttttccctattaagactgaagactataattatgttgcagaagaaataaaatattttcatgtaagacacactctctattaataatatccatcattatcaaattaaaagattcgagatcacttaagttactatctttttttaataatttaatatgtgcaatcttatatagtctttcccataattgttttatatccattaactcactagtaatattaataaatttatctttaaataactcgttcatgtctataagtaagtcatataaaaaatatctactccatctcatatcaaataaacatttcaaatacaaaggaaacatatttctttgtttataaaaatcttcatttatattttctttaagttcaagagctgcaatcttaccaaaataatatatcttattgtttttttgtataattaaacctcgaacatactcactggatattttttttagtgttctcaaaaaaacatctttaagattttccatgcttattttttcctgtataatcacatcaattgatgagtaagatgaaattctttctataccttttgcttgagccaattcaggtatagcttttcctcctttccaaaaagaatggaactcctccattgatatctcacccataaatttattaggaactggatcttgaacaaatactctatcttctgtaagtttgttaattgcgaggtaatggtctgtaacatatttatctgtatggacgtctatatgactttttataaatttggggttcaaataatcattactatatggtagaaaaaaggtgcttcctaaggcaataaatacttcttgacgattcaaacattcttttatatactgaagccctttttcgaaattagaatatacatgtttctccatacgaaatgtttgattatattctaacaactgtgtatatcttgctacagaaggtaccgatgtgatagtatccatacgatatgctggtatactatataactcttcattcgctattaaactcatgtaactaatgctacccatactttttaatttatcgtgaagaattgggatatagcatgaataataataagggacatcaaaagttggaattaattctttcattttcactacagcactcaccccatatttattttttttacagccctatccagttctcaacagtataattcaactgtaagtccttagtagctttaaattttctatttggaataggttgtcctaatttatccacttcaaagagcctaaatcctcttgaaaacttaaacctgcatgcaaggtcccttggcactttaaaattccctgcaaaacgatttttttctattctatctagtatcatgcctacactcatataaattcgttcaccaactggtgtattttcaggtacttcgactattacagaaacatctacaaattctgataatgtttctattaccttatattttttaggtattccttttacaccttgtgtcacaaaggtaacttcggcttctcctattttcttaggtataattgttccatcccccataacctctaacacatctgggttatcaactaaaaatacaccatctaaaacactcatttcaaaaccactatcgtacgtaacaattggattaattttcactttcattccagttaatccaactacatctcgaccatctaatgtaacattaactatattaccaacatctccaaagaaatatattaatggtagatgcatacgttctccccagtctttctcaaaatgtgcaccatttggatcctgataaaaaattaaatcatctctatatttataaccattttccaataaagtttctgcaatatccctcacatgttttaccaagaaaaaaccttccgcactacctatatccatccatattttcaagtctttttttccttcatacatttcatataattttaattccgaatgatcatcttcaactttcacaaagaatggagataacatcccaattttcccaaacacttcaggattgcggaaaccaatattataagttgataaaccacctgctgatgaccctattagagcagtgttttcagtattagtcaatgttctaaaattttcatcaatgtaaggtttcacctcattgattataaatttttcatataataaacctgagcattctatatgtttatctggtgaaatgaaatgacaaaactcattattttctatgattcttttatgtgctatacctactattattatctcttgaattttaccttcataaattagcatatcagtcgttttgtggacattccatgattcatcattttttactactggttcaaacaagcgctgcccagcatgcatatataatacaggatacttttggtacgaattactttcataaccaggtggcaaatatataaatagtttcctactattctcaagtatttcagaatgaaaattttcaatcgtaatcactttagaagctcgttccatagtaacctccaattttctatttttcactttcattaatacagttcttttctagttttttctttaaaaccgtatcctttattaacttttaatagaatttttcagtataagcttttgttttaactaccagaatgaaattccccaaattttaattacaattgtaaaaaaagtttaagactccaccaagatagttttttctgcagtttgccattttacaactacttctccagttccaaaactcggggtacgatatttatgattctctccgccttcaatcaatagtgtgttattgatctttctaataaatttgaattcaagcaaggtatcagccggaacacttatatcaaaataacccgtaggaaattgatacattatttgattaaaaaatggccctactgctttgcaaggattcatatttcctaatgaatatgtgttccccattataaaaacttcactctctggtatttcatatccattttcaataacaaatcgaatacaaacttgctttgtatttaagacctctatatgtttataaatattactcctagttcctgtatctgttacaacagtaatttcatatttaccatcgtttactgctggaacttttacttttatactagtatgtgaccacgaaacaacttccgcctctttttcttcaaataatactgatccttttttagaagtaaagccacatccttcaatacaaattatttgaccaacggttgtcattttatgtcccacagttcctattaaaggtatactatttactcctttatggtgccaaacatgtactgacccaggtccaagccataatgaatctatattattattttcaactctaattgcttcaccatctaaaagaccatctaatatgtccttatactttctagaaggaagaattgttttaacatcttttatttcatatccttctgttaaatttcgattcaacgctattaataccacatcacttccaaagtacctttcatatacataaatatcattagttatatatctttctttggtatttccatatggaagtgcataatttaaactacgaagggaagataaagattgtattatcttaaagttatctgtattcacatcaaaagattccatttgaccacgattgttcggatctccatttccaaccatatattgctctgtaccatagtatacagaaggtattccccttgaagttaacaagaatactaatgattgttctattctacgtttactttgtccattaatgtgaaaacggtccatatcatgattatcaataaaagtaacaagattatttacatcattataaatttgatatgtttcttcaatcattttgtgtaacccatgcatggaatccattccatctcgaaaaacttctcgtactttatgagcaaaactaaagtctaataaactcataccactattatttgcaaaatgaacatttctatggtcatactcatttggattgatataccattcaccaaaaataaatactggtctataattatagattgaatttagccaacttttttgccagccatatgacatgtgttttactgcgtcaactcgtataccatctatcccttggtctagccatagtttaatagcttctttaaaatacaaatcaatagctatattttggtgatttagatctgcaagatcaaataaattacgataaactccgtcttcatattcttcaaaatccgtcccaccattatgatgaaaataatgattgtaatcattatcgtatccaccaagtaacaatccattatcatataatctaccattttcagcataggtcgcatcatcatgtaatgcaggcgaagtgtgattaggtgcaaaatccataatgattttaatatcttttgcatgagcggttgttattaaggtttgaaaatctccaaatgtcccaaaaaaaggatttgttcttttaaaatcacgagcccaatagccatgatatgaagtacttcctaccaaatcatttattggagtaaagatattttctaccggttgagatatccataatgacgtcacacctagttcagtaaaataatttgtatttaatttttcaataatccctatccaatctccaccaaagtatttctttttatttttcctagattcatcatataatccccctttgggattatatgatggacatccattatggaatctgtccgttacaatttgatatattatatccttagaaaaattaacgttgttcctattcaccttaagcttatctttttctttcaaatgacaacctccatcccatagaagcatttaccagctattttcaaacgtttagcactctacccttaagtactatttgaaaaatagttaaaatatatttcgcctcctaactagtaactcatgtttcgattcaatttttcacacaaaataatgtctacaagtgggttctatatttgtcctataaactgtaccatttgatttatgtcgaagtaagggaaaaaatgtcattatatagggaggataaatatagaaaattcttacatataattatgcttacaaaatatagccccaataaaatacatagacaaaacattttttatttggtaatattcacctgaaaatatttggtaaaactttatgcggagaggagtattaaaagtaaatactagattattaataaaaatactatttatactactaataccaatcttatattccaaaataaactataaaatataaatatagcttccaatcttacaaatattgaaaatccaaggaaaagctgtaaagaaatttcaaaataatctggagaaatattttatttttaaaaattttatataaaaattaaaacattattgtacagttaaaatgttccttcctaaatgctaattaaaattttctttataaattaaagatttacttctacaaatttgataatgccattagtagatattttctagtaatttaatttcataacaatttaaatccacttacattctaagatttctatggttaatttatattgttttttatttttcaaacatttatgtacttaaatcgatttcatacctgccgtttttacctcaaaataacaatatcatatattaatatagctcttttacaattagattccatttcattaatcatctaactaactcgattactaaagttcatcaccattagtttgcaaacaaatttttataaatgagatacttaaatttgtgaggtgacaatactatgcaacaacaggtcgaattagattccgctcttgctgtttcttcgaaaaagacattatggaaaaatcgtacatttacttttgtatttacaggttataccttatcaatgtttggaaattcatttcacagtattgctttaaacctctgggtactgcaagcaacaggaagtgccaaattaatgtctacaattgccataactcatatggtcatgagcatgttgttttcttccattgcaggtactgttgcagatagggtggatcgtagaaaactaatgtggataacagatataataagaagtcttttaatactaagcatcgcattttgtattgcaatacccggtaccccctttattcttattattatcttaaccgctcttacttcctgtgcaggattatttcagtcacctgcattccatgcttccttagttgatattgtaggaaaagacaaagttcaacaagctactggagtattaaatgtagcagataatgtatctcgtatttcggggctagcaataggaggagttgtagttgcagcatttggtggtagcattgctatctcagttgacgcagttacatttatgttatccgctattttagtgttgctaagtggaaagtttcctaattctacaaaaaaaacaggaatcaaaaattcatttcaagaggaccttgttgcaggattcaagtatatatggcagaacccttttgctaaatctgttattatactctcgcctactttaatcacatttttcactgcttcattaatgcttattcaagtaatgtctgtaaaagtgtggaaggcaaatccgattgaatttgggataattgaatctagcattccaataggttatatgttaggcgcaggcattattatcttttttgataataagttacatcgacggggttggtggataatcctgagtatggttttactagctccaatctttgtagggctatcttttgctccatctgttctttatgcagtaccattaattctcctcttgggaatacttttttcattttgtacattgcttgtcaatgtgattattaaagttgaggtagatcctgagttacagggaaggacttttggaacactaggttctcttacgagtattgcatcaccagtcgctttagcaatttcctcatttttcgctgacatttatggtccaccattaatcttattaataaatggggtcttattatttatttcaggactaattgtactgttctttcttaaatcaattagatcatataaatgattctttttcgttataaaaaaatttaagtatccaaacttgaaaaaagccgaaattgttaaggatatcaactccttcggctttttttctatatcatttaaggagagatttttatgccaaagaaaatacttatactcggaacctttctgatagcggctagccttttaggttgcacagatatagaacacaaagatactctcaacaaaatagaagcacccggaaaagaaccagtggatgtaaaagaaaaagttgcacttaaacatatgacagcagaagaatatttaaaaaactataataaaattaaaagtactgtatctacacaaggcattgaaattcttccatttaatcttgaactagaaaaaaaatctaatacatataggttttattaccctaaagaagtagataaatcagatcaagatatgaaatgggtaagtgttatgttaggagaaagcggaaaagtaattgatggaattatgtatactggctacgcagatatacctacgattaaggcaatgattcaagctactaacattacatggactaatgaattagatcagttaattggttcaataggaaatgaagatttttcaaaaacattggaaattgaaaaagtgaaactatctgttaacggtaattcgaaaaatattaaagttatgatagattcaatgaaattagatccacctcaatccctttaaaacaaatatagtcccaaattcctatttaatttctttaattttacaccatatagaaatttatttagcttttaataattaagactagctatgagactatataaaaaatcgtcagcgcttttaaaaagcaactgacgattttttattctctaacattttcatttaaattggcatcaacaataattccattgacatctataataattatgtatgttatatatttcttaatctcttgttttaattaaataacagattcgctatgcgaaccgaacaaacaatctcttatttctccatgattctacaaatgcgctttaaattttatacaacttgaaactgacccaccaatgtcatctttatttgatgaggccttttctatttttaaatcttagtgcttttaatatagtttctttcatgatttcgtttcgatttctcttttgtttccgttgttcttgaaatgaaattgaaaattaattatagtatcccaaatggtatacacaagctatttcacacaaatgattgaccacgttccttaaattgtatttaaccattaatttttgaattaccaataatatttttcttggttattacattaaagttaatattatgatatatttatattcggaataattatatcttacatttaaagggagaattctaatggataacctactattgaaaaaggacttaacaacggatcaaatggttcttgttacttcagagtttgagaaaaagaaaaaatcaaaaggacttgcttacctaatttggttttttctaggcggacttggtggtcaccgctactacgcacgtgactttggtatggcaattgccatgacactgactcttggcggacttggtttctgggctttaatcgatgttttctttattggaagccgaattggtaagaaaaatgaaatattagaacgtgaaattattatgaaagttaaaaagatgactgcttcaaaacgtttatcttcataaaagacctcctttaggaggttttttatacaaacacttcaattttacgtaactcgtccttacttctctttttatgtatttttatgttttaagaaaatgactccaccaactagtaacaacgatgctcccactgtaatagacttgacgcttgtatggaattgatcacgcagatatttcgatgtaagatttcatgtttaattcagatatattgatatacactaacaatgaactactcaacattttcattttaagttagtatatcaaaccctaactacctaaagaactcaagtaaacgtatcttatgtcattttaaaaaatacaaaagtaccttatattttataaggtacttttgtattttttattttagaattcctcgatttaaactgtaaaattgaaatataatacagattacgaaccgttttacacgtatctcggatggacttcagaatcacatattgttataactactgctattcttctctaattacatctataacgttatcctttttaattttccgaagcggaattagtaccgatacataactaatcaacagtgcagtaataaatgtgataaaactagattgataaggaataatccattcaaaagacaccgtatttgacaatgctacataaagaatatacgacaacatacagccgaaaaagatcccttgtatacttccaaagaaaccgtacaggagtccttcatatataaccatctttttcaaatccttctgtgacataccaatcgattttaaagcagccaattcttttcttctcataatgatgctgactgtaatggtatttaaaatatttacacatccaattagtgtaataacagctataaatccgtaccctaatatttttatataaagtatattgtctgtatggaaattactttgaacaatattattttgtacatctatagatgcatctccacccagtttcttttgtatatctaaaattgtagcatcagcccgagattgattctctaaatcaatttcaaaacctgttaatttttgtggagatggtgtaatatattcagctatttgttcactagtaataaaagttatggtatccatcactctgctcatattaaaaatgtccaattctacaattgcagctatttttaaagtttctagtttttcttcattgtaggagatttcctctgtagattttctttcttgctgacttgttatttggatttcatcccctacctgaaaagtgcttagagaacctatatattttttacttgtattcatatcatttgatgcagcttgttttactaaaacaacctctttttcacgatttaattttgaaatatcaattcttccactagttacattttcagctagtttctttaaactattctcatcgtatgcttttatttgtgttttcataatttctacagtttgattattatattttattttttgatacagcgattcatttccttgtaattctttaatttgtttattatttggtactttcgtataaaaattatttgcctgatatttcttgtacagcttctctacgttattaactttataaatattttgactcatacgatctatgctaggcttgtctaaatttgaattaaccgtaactgatatatccgattttagagcttgaatttccggttgtttacgctgaatggcagtatctatgagaaacgtaaacgtgatatacagtacactacttataataatagacaaaattgtaactgtatatctattgggattcctttggatattttttaatgccatacttaacggaaaagatagtggtttctttaattttgttctcttttttttctttattttttctttttttatagctaatcggctacttacggccaataacggtgaaattctacctgcaaaaaaagcaggaaaatagcttgaaatataaacagttatcaatgtaattaaagaacatacacatataattaaccaatctaatttaattgtatatcctatagagtttttaagtacgtttatcaatacttgattaagtaaaaagactactaatatactgcacaaaatcccaaaaaagatagcaataatagaaagaaatgttgcttcccttatcacaatctttctgatttgtttttttgtagctcctatactcctcaataacccaaactgtttcattcgctctactatactaatttgaaatgcattgtaaataataacaattgtagaaatcacaacaatcccaatactaatagcggctgccgccattatctccacactaggctttaaggctttctttaattggtcattcactcttatattttctttattcgtcaataatttaaattgattttcaacttcatcaaagtttgcgtacttatgcaattcaatcaatacgctaccttctccaactttaaacttatttttatatgtcaataattgaccgggtttattttcctgattactactagacttatttaacaaaccaacaagtttatattttttttcatgaatagtaaacataccgcctaatttaagattaggcccgaagtaaggcagcatccatttttctaaaacagcctcgttttcatttgaaggtagcttaccttctacaggaatactagactttaacagcttcaatgcttgatgatctgcatacatataagagacagctatctcatcaaattggatcacctctcctggagttatgatgccataagaagatatattaggattactttttatcatattgaaaagcttttgattataattttcaactgaaatatttgcagaacccatagaaccttttttagcattttcaattcccgaagtgtatccactattaaaaaaaagtccaatcgttgttattagcgccaacgctagaataatacctgttaatgttagcaaagtacgttttatattacttctgagatatttttgacttaactgtttgtaactatgaatcaatactcctcccctccatatttttcttgactttgcactaattgtttatctgaaataatcatgccatctgtaatggttataattcgatcagagtttgatgcgatagcaggatcatgagtaattaaaatcaccgtctgattatattttttagccgttacttttaataaattcagaacttcttttgtattttttgtatctagatttccggttggttcatccgctaagataatatcgggtttatttataagagatctaccaatagataccctttgttgttgaccacccgataattcagaaggcaaatgatctcgtctttcatttaaccctagagttcttataatttcatccaggtaatgatcatctacctgttcttcgtccaatagagctggcaaagcaatattttcttgtacattcaagacaggaattaaattaaaaaactgaaatataaagccaacttttcttcggcgaaaaatagagagttcattatctttataattgtagatattttcatcacctataaacacatttcccgaactcggacgatccagccctcctaaaatatgcaataaggtacttttaccagaacctgatgctccaactatggttacgaattctcccctacgaatggaaagattaattccttttaacgcctgtacttgcgtttctccttctccatatgtttttactacattttctaatctaacaacctccatacaactcatccttttcacagattaattttgaatctctacaaaatagattttatccttatcgtactcaccattctcgtctttcactgcatacacttttgaaacgtattccaccaccttatttaccttatttttatttttataatcaaacttttcttttgcaaactgaattaacgaaaggcttacttctttttcttttaattgtttatacgtttcctcattaacaattactatcggtgatgaaaaatagccaatccaattattttgttcaatatgttgaacaggtatcatttgtccatttaaatttaaatttccatccttaacttcctcatcttccgcttcttttctataaaataaatttttttcactcgctaattcttttatttcttttaccggggttgaagttattgaactatcttctttagataagggtgttcttacaattcctttttttaagaatttttctgctgtagattttgtaataaccgcgtattgtttctttctaacagatgacttatcaaggtctttgtccatctcttcttcagtcatattttctcctttttctttccattctttcttaatatcttctttctgttcggtagtgagttcttgttttattacttctgtgaccaatttataactataatctgctgtttgcacgttttgatctttatacagatttttaacagcagatatattttctttcgttccagataccataataccgtctactggttgtgagggaccatttatataacgatttacagcaaaccctatacctataaaaattgctgttactactagaaatcctattatctttttcattttcttcctcctcatatactatgtttaatctgggattagaacagtaggttttttctttatataaacagtggctaaaatgctacaagtcttaataaagaatgattaccttcagtatagacgtctttaattgttaattgaataactcttgtcttactatatatactttaatcttacagtttagtaagattactaaatctaacttttgatatactcgtaacactgatcaagatatactttaaaattaaatggcttttatacacttatttaagtacacacatatttttcaaattctcaaaaatccgctcccattcggctcttattctcaatgatttgtttttttaaatccatttacataattaatgcgaattcaatttcatttaacatttttgtataagataacttaaacaaaacattaatggttttataaaaacgtacaaattcaacaagacactattacaaggtttttcaaaatataagcaagtacatgtatgaattacataaatattctactttaagtaattgtttgtatctcattatgtactaaaaagcttcaagccgatttgggtattatgcttatactcagaaaagcctctaaaattccatttccatactaaactattttaaattagccaaccaacgtgtaaaataactgtcataatctaaaatactgccataatcaaagacaaatgaggagagatactgtggataaagtattattcgttgaagacgataacgatctaggaatggctattgagtttactctaaaaggagaaggacttgaggttataagagtttctactgtacaagatgcaaaagaccaatacgaaaataataaatttgacttagctatattggatgttggactaccagatggaaatggatatgatttatgtacctaccttaaaagaaaaggtgatatacctattatttttctcacagcactggatgaggaggctaatgtagtaatgggccttgatattggtggagatgattatataacaaaacccttcagggtaaaagagctattatctagagtaaaagtacaattaagaaaaaaaattaaaacagcttctaatactatattgaggtctgaaaatatacaccttgaagttgaagcggctagagcttttaagcatgagaaaagtataaatttaacacatttagaatacaaactcttattaacgttaatgctaaatcctcataaagtgttacaaagaaatgagatattgaaaaaaatagtagatgaaagtgaagtgtttttcgatgaaaacactctttccgtttatgtaaaaagattaagaagtaaaattgaggatattccccaaaatcctaactatataatcacacaaagaggtgttggatatttttggaataaaaacgtcagtaaggagtaatttaatgataaatagagaaataaaaattaatatacttacattagcattaatcgcttttttatttattatatatcaaggtatcacagttcatattctatatgaccatttaaagaatgattatattactatttggagtgaaattaccgggaaactaattgcacaaaacccagaaaatgaatatgaaataatacaagcacttacaaatgatacagcgaataaaaaagagtattccagtgatggagaaatgctattaaatcaatatggtctatctgctgaattagactcaagactttttccttatttaaataaacatatatctcaaaacaatatatacatgttccttggagcaatagggttcagcttaatcctaatttttctaaattacttacaatataaatcttttttcttaaaaattagaaatgtaacagctgcagcgaataaaattattgaaggtgattacaccattgatatcaaggaaaatagagaaggagatctagctaaacttgctaattcttttcataaactgaaaaatgttattagaaaaagtatgcataatttaatggaagagaaacaatttttaattcaaactttacaagatatttctcatcaactaaaaacaccactctcaacactaacagtgaacaatgatatcttattacaaggtaaattaaatgaacagcaatatcattttttacacaataatgatgttcaaatttcaagaatcagctttttaatacataatttattaaaagtttcaaaaatagatgctagggcaatactatttgaaaaagaaaactctgatattattgatacgatttatgaggtcattgctagtttgaaaagtaaattaaataaaaaaagtatgaacatacatttaaaagccaatgaaaaaacattacttttccatgacagtatttggatgcaagaagctttattaaatattttaaagaattccattgaacattcaaatgataatagttccatttatattgaagtcacaaactcccctattcatactgaaattataattcaagattttggtgaaggtattgcatcagaagatttgccatatatatttgatagattttacaaaacaaaaaattctaataaagaagggtccattggaattggcttagcgctatcaaaatcaattatcgaagctcatcatggatttattaaagtagaaagccaaaaacattcattcacaaaattcacaataacttttatgaaatattaacagtacataaaagttattataaaaccctaacctttgagtatattttttaaaaattaatcatctgttaaaaaaagaaattcgattaatttttcataaatgactgtagagagataaatttttcctttgggggtaattaaaaaccttagcttgatgtgcataggatcaccatatcaaaaaaggaaacttgtacgtttggacacaatttagaaacaaaatatccgattccttgtacgttaagggattagatatttattttactattttatattgtgtacaatttcttgcttatgaggtctgtgtggcaaccgaaccaaatctgatgataagtattagtggacatcaaaaatagtacattaatataattgcttttattaattatacaagtctacctgtggcaatagtctcaggtattttttcgttcattgtgtttgtttaatttgttattatattttcttaataaaaaataagacacagcccaaatcacgacagcgcatactatagttcctatacacttaatcaaaatcatttattctcaaattattaattactttgcttcaatacccattctctttacgaaaagtatcttttccattcatgaagtcagctgtattaccaggaatgctatacttcatattctttttcttagcttttttcttcaccctcttctcttctacaacagcttgtaaatctgccttccattgtttaaacaaatccatttcacgacacagcgaatttgtaccccttggtttaaatctgaatcaaataactatattatatctatttatataatcgtttaatataaatattcatttttccaaaaaataaagagcacctgacgatttcaggtgctcaaatatatgaagtggggctaccccattctctaatatatgcctgtccttattaaaaagtgcaaaaaaagggtacccttcaacaaataaatatggtgctccaaagtttcatctcacatgataattcgtcccatgaattcatcatatgcttgtctaattagaatgttcactggttcaatgcggaatttctttttaacttttaacaaattaaaaacatccattttggatacttaatgtacactaatattaatattgaatagctttattgatagactgtctagagcaaaaaatatactagctgaaactgatctatatccaatattctttcctgtaacattgatagtaatctccgctaaatgggttcgcacatcatctctttcaaaaagtttatcttcaaccttttcgactattgctacattatccacttctttaaaagttttcagcaattttgtttgaagtaaagtaaaatcgaaattttcacctttaaccacatcaaatttaatctacatttttaactagtaaatatatttatataaatatatttttgtatattaacattaaataattcaaaggtcattctttattaaaatcccctattgcttaaatttgttctttattttcacataaggtacgtgaaattttattatctcattattgaataggagaaacttgaatagctagtatgcccccaatctactctgcatggttccactatccattaagcctttaataatttacgtgtcttatctatttcgtatgtgtgttaaccagttcgtttgcaaacttgttagcacattttttatatttcttctatatatatttcccttcacaaacatatcatactttcccgctaactcttccagtttcttttctttgtatttggtatgtataaagaaatgaagtattattatttttctatgtttttttattctaaaaataccttttcgtttcatgaggcttcattttatacatcatattaataggagaaaacatacatgttaccatttgaatccatattcaagaaacaaaatgataaaaaagactaccataaaaacccactcattactagaaaaaatacataatataattgcgaacgtataaaattcaggtatattttaagggggaaaattatccaatgtcaaatgaaccgtgtccaattattgctccgtgtccagttgtcagtcaaacacaaacacctttatctaatgcaccagcagaacctattgttacggtaaatcctataattaaagttccagttgttttagcggagagaacacttcaaattgttgtagaagcagatgttccattagatccaccggcatctgaaattaaacgtgttctaaaaaatgtatttttaacacaaggtaaattagttcctgtagcatttactccagtagaaggtacgccttatcgtcgtgttacaagagcaaaattatttgtatcaggttatattcgtaaaaatattgaatatgcatctggtgaatgtaatgcagctttatatgatcgtattgctaatgttcctttttctggatttgcagatttaacagaaggtgattttttcactttacctttaattgcagcttcttcagatacagcctctcattttattaatcctaaggatggcgatttacctcgtttggataaatatttcttcgaaaatcatgtagtttataatgagcaacctactgttgaaataatcagtgctaatttttatgaattagatttttctccatgcccaacaacgttagaggcaacatttgatgctttacgtgaaaaaattgtgttagatcttacactaaaagtgttgcaagtacaacaagtacgagctggtattgtttaataaatagaaaaagacattaccttctttatagaaggtaatgtcttttctgttttgataaaacatacataatattaacaatgagtgtatataactgatatgggtttagttataaattcatcggatgggatgtgtgttactgatgaataagccatggtctggtaataatatggggcataaaatttataagattaaaaatttaaatgagcaattagtttcaaagaaaaaacaaaaaaaagagaaagagaaggagaaagagaatgtattttctgaaatgagtcaaagtaatagagtaaattccatggtggtaaaaacaccgttttctgttgtgtcagaagtaactaattttttgacaaatcctattttgagtgaaagaaggcaagaagtgtttcaatttgaaaataacaatattaataatgaatttcgtgaattagagacacaattaatagctacctcaaattattattatgaagagccgtattgtaaaatggtttcttctaagatttttgaaaatagaattcttttcgaattggatttaaagaaaaatacaagtgatattccaagaataaataaagtagaatcatcatgggttcctatacacaatttcatagtaaagaaaaaagaaatagaatttgagaactatataacaggtgaattaccaattgaattgggtagatataaaacagaaattagcttacaagaagtgatagattttaagaagaggattataggttttcaaaacatttcacaagatgttattttaactgaaagtaaattattgttatcaaagagaacagagagagcaaattcaatttcaaaagaaattgtaatagataaaggtactttatttgtgaatgggcatattcttcaaacaattgaatgtcttatagataataaacaatctggtgataatttttattgtttaatgcagaatatagagttggaaatagttattaagattttacaaaaacaagagctgtccaattgattgaagtgcaccccaattgttagacacagtctaacaattggaggtgcattttttatttttacaggtctctcatgaaagtaaaaaaattaagtttaaacatactatacgaggagcggaagtgctgaacataagtgctgaacatttttcaatgacaatgattcaagccttccaattatagtgtgtacaaataattacaattcatacaaagaggcaggtgtaaattattcatacattaaaattactttattatagattgagtgtattacaaagtacaaagagcacttttcaaaagtgctctttgtaaggcgtacattaaggacttgaaagaggcatcattgtcaattcgaaaggagatatctatatacaacatatgaagatgatttgaaagggtgacgataaaaacaaaaagaccagtaagggtgtaccgattgctcagattcaaggaattggagagggggatttatattgttagggaattttttgaatgctattccattatgataaactatgcagatgaataataagagtgaagttgtaaatttatcatctatagtgtaatcttcaccatttgaaataggaactcttaaaatgttatcctgagaaactagatgcgatcaatcatgttgataatcaagtgcttcgtcctttgtagaacctggggaggcatatgccgctgtaattcttcagtaaacgtaagcatttaaagattcataaagaaatgctatcccttcctataattctatagaaaggataacgttttttgctttatgggtcgtataaaactttagcttgatagcgctgtgataatgccccgtttaaacaaatttcccttttccatactgataatgccccttttttagagtcatcctatcagcatgtcgaagattaggagattacttgcaagagtcttggaattattgcaaccgtgctgtgttataattctaaagtactgacatttcatgtaggacttatagatgtcggtttgacatatgaaatgtaaaatcaatccgtcattttgaaggttcaggctaccaatatttaaactattattcgaactaaaagaagtacaaggaggaaggtatatctattaagatagtgagatatgccaaattagaaatgaatattaaatttaataaaaaagtagtagcattcacggcaggattaacggtattatcttcaccattggtatcgtttgcagaggaacaacaatcagtaaacaataagcaatctacaagccttcaagtgcaaggtaacacagaccaacttcaaacaacaacagatgaacaggctttaaaaagtattgaagctagttttgaagaggtagacggacgtggtggaggtactgtcgacaataggaaagtagatagtcttcaacgttcagaaggtattcatgaagaaacaggtacattaactgttcctaacaattcaaacagaacaaaacgtagtctgtctcccatatcacctagcacctctagtacaataaacggtgttccattcactgaatggattgttccagcaggtaacgataatattcgtcctcaaaactacatgagtccaaagtatattacaattcatgagactgataatacaagtgtaggagcaggtgctagaaaccatgctcaatacctatataaccaagcagtaggtaacacggaccgtgctgcatcgtggcattttacagtagacgataaagagatttatcaacatctaccattaaacgagaacggatggcacgcaggagacggtgatggtccaggtaatagagaatctattgcaattgaaatcgcagttaacagtgacggaaactacagtaaagcagtagataacgctaagaaacttgtagcttatttaatgaaagaaactggtgtaccgttaaataacattgtaaaacaccaaaaatggagcggtaaaatctgccctgctaacatgattaataatgggcaatgggatgtattcgtaaatagcgttgagggatattataataatctttatcaaccaaaagatgacattacaggaggttggtatgaagaagctattcgagagttaaatagaaggggtattatgataggggaaggaaacggagttttcgcacccaatagagcgataacaagagccgaatttgctcaattaatctctaaatctctaaacctgccagctggagatgcttcatttaaagacctaaacgatgcaaattcaactttacgagatggtattaaacgtactgcaagtgcaggtatcattcaaggtagaggagatggttattttgacccaaacacacctattacaagagaagaatcagcaattattgtaaacaaggctttacagtataaaggtatatggggaccagttgtaaacctaccattctcagacaaagaccaaattagctataaagaagatgtacaaagattgtatggcttaggtattgtcaaaggtaagggtgaaaatcaatacgaccctaaaggaacaacaactcgtggtgaaacagcaacattcattctaaatatgctacaagtaattgaaaatggcagtgttgaaaaggtagttggaacagctcaaattaatggtattggggtaaatgttcgaagcgggtcaggtacaaactattctattgttagaaagacaagtaaaggcgaaaaagttacagtatatgaagaaaagaatggttggctaagaattggaacaggtcagtggatttattatgactctagttatatcgactataacagattataaaagactaaatacttaaaagaacaggtcatatttggatatataacttaatctcaggttgtgaagaagactttcttcacaacctgtttttgtgataattaagcagaggtcactatacatacccatccagcccatattatgaaataccttaaaacgaaaaaatgagctgtattgttacaagttagcacaaaatttcgttctgagggtactataaaaccttcgcttgataataaagagataacattaactttgttgcctagaattgcttgtgctagatgtgggtagattcgaaatttataggctttattaatcatcacttgattcatcttcatttttgtaggtgtctccttgattaaaatgataaaaaatgcaaaaagaacttgtaggcatcactacaagttcttttttagataatataaaaaggtgaaacaaactatctcattactcgtaacagggaaactatcttacttaaggcttggtttcattatataacaaatattaacatgaagcgttttaatgtgtgaaaattatgtgaattagcaaatgaaatttcatctctattcgttttttaacacctataaatcaacgttgaatggataaacaatatttgctaaaataatattataataatgcgatatacagcaatttatataatagaaagataaaaaatttacatatcactaatttaacgcttagccgttgattaatggagtaaggtaaataacgaagtacatttaatatacaattctttacgcagcataagatacgtaattaagacatttgatagaaatagagtgcgaataatgagaaagatgctgacttgtgggttacactgatcaacttgaaatgttataggggtgtacaagtactacagccaaaaagtgatctgtaatgaatatcgaagaggcttacgcaaagttatatgtgagtctatgtgcgaaggaaaaggataacgtttataggaggaagcatgagggggcaatttaatatatgtaacgggggaataatattatgaaatttaatacgaaattattaaagaaattacttgtattaagtgcaacgtctgtatcaattttcagtgcctgctctgcaaaggaagatggggattacaagccatataaggaacaagactctatagaagtcgcaaaggtcgaagaggagaagactaatccccctaagattgtagagaagaagtccactctgcctaaggtcaaagaggatacagaagaacctaagaagaaaaaaaagctacaacaagtggaggaatctaagaataaagatgaggaaattaatgacaaatatccgcattataaagatgtacatgaggacgcatcaacagtatcactagaacagtataatcaaatcaaggttggaatgcctgcggacaaagtcatagagatagcaggaaagcctggatccagcgaaacaactaaattgttctctatctacatatatttaggtcacggtggacacggttcgatgactataaagtttgattctaatagaaatgtaacgaacaaagagcaagatggtcttagcaatactgcagttaaagatgagaaggctagcaaagaacatgaagaccctaatcctgaatctgttaagaaatctagtgctataattccaaacgatttttgcggacatggacatgacgaaacgaaggagctagcgcacgactgtgaaaaaattactgataagaaggcatatagaagatatcaactacaacaaaagagagaagagcgaaaaagacaaattaggggcgaagaacaggaattaattgattacgatcagggggatgcagcttacaaggagcagcagcgtatatacgaagaaatacaacgtagaacagaagaaagggaatcgattgactacgattacgatcaaattagagctgttaacaaagaaaggcagcgtatgtacgaagaaatacaagagtgagatgaagaaaaagagtgtaaagtgtaaactaaaaaagctaaatggtacgaggagtatatttcatagataggaatttgaattattgaaaaatcaaaatatggaagagtaaataaaagacgctagttggcgtcttttatttatcattattagtaaaacttcactggtgattactattaatattataatatttgatcttggaattaacttattagataatgcgtattgattgtataacatctgacaaatgactaaagataataaaaaaattcttgatacgaaaatctaaattgtataatatataggtatattgttatttgttgaattccgtttattcccacgccttatgtgttgtggttgagttgcagaagcaagttgtgttcttgtttcaattttgaaagggcttctttgagccgattagtgcatatatagcttattttgttatgcacatttttaatcgacttgaagaagtcctttttatgttgttttcaagttgcaggtgggattatttatgattcataacaaaatgaaataaaataatgtttgaatagtattagtagatctaaaagagtaatctaaagagccggatgatatattgattgatatagataagttattagggagtgcaaatgaagaactgcgatataaatcatgtgatggtagtttatacaggggaaaaggaagaactaagtgatatgaatacttggagcttccttttttattgcaattagaaatctggtagatgattatgcatataaaaatgatttggcggaaaaattttatttaatttcaatacatagaagaaaaagaaaaaaacaaattcgtaaagggctagtttaagtacgattcatttgaataattgagaggggaaatgtattggtgaaacgtcttgtttcttgctgaccaagggaatgcaggatgattagtaaggcgtaagagcgtattactactctcacaaaggaaattacattagaaaagggtctgtcagtgtttacaatttatttgttacatcggtctaaaagaatttggatggagaagtaaatgctaagtgagaacatgaatgacatttctataacttgaacaattgtgctttttgttaatagtgaaaatcagaagtagaagaggcacaagcgttaaagtggactgcaaaagtgacagaaagagaacaaggattaacattatttataaagatatctaataagaagtgctatcggatttatacagaaggagggataataccagaaaatatatgaatgtatataaaatttgaggtgaatccacctattttctatacattagttgaatcaaacaatagatgactagggagtgtataacatccatttcccagttaaattttcttagataaatagcatgaaatacagtatgttctcactcatttgtataaggataaaatagccttttatttttatgcaaatgagtgaaacagaacgattcaccatataagaatattcgactataatgaaacactgtacgtcattgtaatattaagatgttttaagattaaagtgattattagtcataaaatatgagtttcgagacctcagcaaaatattgcaatgctttatatacatgagattgtaaaaattattttattaaaattactggaggctgatgaaatatgataatagatcatataagcaacaatgtagtaaaaaaattggaacaaacggtgcgctatgaaaagaaacaggtacaggtattacgtgtaagtaaaagtagttctaatatgcacgcttacatgattttcccagaattctcagaggttaaaatttcaaatactgaactggatgaatatatagaaaatctatcaacaagtctgaaatatgtcattgatcgcaagttaagtctacaagaaattgaaaaacaaaatcattctttcattatgacatgcgcagtcgaggaagatggtgttatagatgatgaaacgattcattttaatacgacgtatgttaagccacctacacttgcgagtaaggtatttaagctagtgtgtggtttaggaaatcgtttgaatagcttaaaagagttacatataacagtattaaataataatattaatcgaattgaaatagagttttataatgaaaatgaaacatatgtagcagtagaaaaagaagaaattgcaaatgcgattatgggggcatatacaaaagccaatatctattattccgcagatctccgttatgttgcagaaggaaatgaaatcaaattaaagagcattaagccaaaattagcgggtgatgtgttgtgaagcgagaaaaagggatgattggagttttatgtacatatgtttttatgatcctagtactcatacctttacatacagctcatgcatctgtaaaaatggattttaatgaattgaaaggaaatgatgtttcttcatcttttaacgaaggattaaacaatcgaacaaaaacgacagagaaagacgattcatttgggtcatcaattatacaaaaagttgagggtatgtatgcaccagcttttaaagtaggggtaaatatcttttctatctctttcatattaggtgttattgtcatggttatggggttaattacaaagaatggtcaatggatgaaatgggcaacagggagtatgattttctcgttcgttagtatgatggcaatgagattaagtgtatatttcttatttagttcggatgtattttcgtttatgaacatttttacggattttttagacctgtttaaagcaacagcacttatttttacaccctttatgttaattgcaggaattcgtttacgaagaattcatgagagtacaaaacaacctgagtattatcgttggtctaatcgcgttataacgggatcttgtttactatgtatgttagccgtactggctccatggttatttgcgaatatgtaaagaaatatatatagatgcaaaaggtactgaatgttcattcagtaccttttatctacccatctgatttttcctttcatattctgcaaatatctcctctgatataggggataatttgttcgatttttaattgtttttcgttgtaaattatttccatttgtagaatgaatactcctcgtagtagagctggtatgcctacaaaacagacgaggaagatagaaactaaaataatatttaaattagaaattcatacctcgtatttaataataacttaatttattttgataggagtgcttgttttgaaaagaaatccagaatataccgctttacgtaattctatcttgataggttggctgctcacaattattgttatgggcttatctatctatttttcttctattatatatttactaattggatgttttattttgtcattgaaatatggattaatgggcactataaagaatgtagaaaagcgtttgccaacctgggctaattttggagtgattgaaaaaacagtgaatcggagggtgacaagaccgtttcaatttcggggcggactcattgtttcattagcattaggattcatagagatggtgataaaaggtttatgtatctcatattatattttaggattagaaacccatgtatatcgtttaatgcgtagaaacacaagaatgtgaaaaggggacttaaattatgaaagtattaatatttgaattaattctaattgtgcttctgataccgataaacattatggtaaaaaaacatgctccaaaatggaaaggaagagctggagaaaagatggtaaaacgtatagtaagaaaattagatcacgaaaggtattgggtgttacatgatgtggcggttcatacagagtatggtgatacaactcaaattgaccatattgttattgcagaaacaggtatatttgttatagagacgaagaactacgagggctggatttatggaagtgagaaggcagcaagatggacacaaggtatttttagaaagaaacactcttttcagaatccatttagacaaaattataagcacatgaaaacaattgaatgggtgatggaacaacagctgccgtgtatttctattgcagcgtttcatccaaaatgcagcctaaaaagagtaaatgttcattctaaagataaacatgtcctatattataacgatctaaaaaaatgtatcgaatcctatattgatgtgaaattaacaaaagacgaggtcgagcatatttaccagactattttgcaagcaaatattactgataaggatactgaaaataaacatgtgaagtatttacagaataagttcgctaaacaataagaaacggagcaaggaacaatgttatatataataggatttttggtaatcatcgtagtagttattcgtcttaacgtgaagtattaccagttaaaaggtaatccaaaagattttgtgatgaaaaagaaggattaaggatttattttagaaatagaggtaatagaatacatatattattttagccatcaccaaaggtcataagaaccgttttacgatcgataaatacatacattactatattttattaatgaatttaagtgatataataaataaaaataaacaggaggtttagttgtgaaagaagtgttagatgtagaaacgtatttaaagaaaatgaagaatcagaaaataaattatgataaagtattaagaaaaatgattaatgattgggaagcaaggaacgaaagaccaaaagtgttacttcattcatgctgtgctccttgtagtactgcttcattggaatttcttgcagaacatgcagatattacggtttttttctcgaattcgaatattcatccgaaaagtgagtacatgcgacgctctaatgaacaaaagatctttgtagaaaagttcaatgatcgtactgggcacacagtaggatttcttgaggatgactaccgttcaaatgtattttttaaaatggtaaaagaagaaggtttggcagaagagccagaaggcgggcttcgttgttcagcttgttttgatatgagattggatcgttcagctgaggtagcacaagaaaaaggttttgattactttgggagtgccattactctttctaaaaataaaaatagtcaattaataaatgaacttggaatcggtgtacaaaaaaattatgattcgcgttatttaccaagtgatttcaaaaaaagtaatggatatcaacgttcaattgaaatgtgtaatgaatatgatgttttccgtcagtgttattgtggatgttcatttgcagcagagaaacaaggtatagatttaagatcggtgaacaaagatgcaatacattatctgaaagaaaataatcttagtttaaaaaaatagatttaatggagagaaattcgatgtaagattaacctatgatttacaaacgaaacgcattatgtttctaaaggaaaaacgtaaaaagctaaaatagttcgggaataactccttactggttaaagttctagagaagaaaaaaccaataaggagtgttttcttaatctcgcattgcccctgcctctcgggaagtcattgctccttgtcctgctcttacatcattttgaatttcttgtttcactttttgtgcatctgtttcagcaaaatctggtttcataacagaaccaggactttttatagattttttacgatcttgcatacaacccctcctcgatttaacatttaacaatcttattatttacaaaaatacactcggtatactccgagtagtataatgtttattgaagaaaaaattgattactataaggtgatagaggaacatagggaataacaatcttgcattaacatctctctcaaaagtttagagaaatatctgccagaaaaacgcctttctctctgtagaaatataaaggaagaatagtgtttttttattttggatacaatagtctaattatgcaaataaccacttgttaaggttattagtaaaagtgggatccaagaatgactaaatagggaatctaatagatggatatggaaaaatttaattcaatataataaaaaacctttatttaaggcgattagacttgctttaaataaaggttccatcaaaaaatcactatcaattgttagtttaaaaccaaattgaagtgtatatattttattgggaaatcgctttatagacatcaagcaaaccattaccaaaaaaacttttattagtaggggtatcattgctaactccatttttataaagatatctcacggccttatctggattttttttaaaattatttttatcaataattaatgctaaagcacctgacacttttggagcggcaagtgaaacccctatagagagagcatagccaccaccaggggcggtagttaatattagttcttttaacattaacttattttttacccactgttctaaaccatattgctgaaataatctattatctcctccaggtgcagcaatatctataaaactttcaccataatttgaaaataaggagagtaatttagatggaccaacagatgaaactgttactatatttggcaactcagcaggaacatctaatacttctccagtaaatgttatcccagtattttcatttttttttctaaaaaaatcattcatttcctgcttgttagtaacatcaagagcatcattaccagccgcagcaactatgatacttccctttgatttagcatatttaatggcttttctataagctttaatttcggataattcctcactagattcaccgtctgaagaagatactataccattgatgaggtattcgcctaaacttaaattgataacatcaacattatctttcgcagcttcaactatggctttaataacccaaatagcctcacctgctccattaccaaacactctatacattttaattccaataccaggagcaacccctttcataaaaccattagctgcaacctgtccagcagtaaaagttccatgtcctcttagatctattaggcgatttaattcacctgtttcttgagattcttgctctctaaatccacctttaggtactaaatttttagatccaggtgaaatgttatcttttaaatcaggatgatttatatcaatgcctgaatcaatgataccaacagttacatttttagttcctggatatagtctatagctatcaccattatgggttacttgttgcatatcccattgattctcccatatttcatttaagggtaggggggaagagacattggttgctacttctcttgaattaaacgattgtaatgacttattatatgaatctatattaggatccgaatgaacaatattcattgctttttcggtagctttcacttgtataacaccaatctctgggacactatagactacttgcatatcatatttttgaaacttactagctagtttttggttattttcatagttcttcaacattatagtataatattgtgatttattttcagcatgaactgtagtaataggtatgaaagttccggaaatcaagttaattaacaaaaggaatttaattatttttttcataaaatcacctcttgatatattatgtataatccttagtttactaaatcgttaatgaaaagagatgttaagggaattagtgatttgaaaaatttattcactttgatatcgataaaatgtattttaggaataagttcattagagaagagaattaaataaaagggaatgagtaattaaatatataaagtatttaattactcattcctatgatttcaaatttaaattataaatctttttttgcatatactttcagagatattatcattgatataaaaccaataataattgagatgaaacaaggcatccatgttaggacagttggtgagaatggaaaaatacttttgaaatcaatatcacttgattgtagtccccttataagagtaggagcaacaaaaggtattaaaaaagcagttaaaagtgatatgattttggttttgtcataaccaaatttaaactgaacaggaagtagtacaccaaataaaatacttagagttaaaaaagttattccaagagcgctagcgctcaggctttctatacccgatggtgcgacaactgaaatgattatacggataatagctgcacaaataaaaattacaaaaagaaaaaggtacttcgcttttacaaatgcgcttcgtgtgtatggggtagcacaaagtaaagccgctcccttgtactgatcctcaaatttggataccgttccgaacaaaatatattccatcaaaataacggttaaaagaaagctaacaagaccgccatcgtttaattgtaattgtgaagaaagataaataggagctatagcagcaaaaacgagtaagattagaaaatattttttgactaacaaaaagtctttcatcactaggttaattaacatggatgttccccccaatatatgaaagcataatctcctcaatagttggtctttctattaatacatcaggcatgagtcgacgtacatcatcttttttattagtaatcccttcaaatccatagtgagtttgatgtaaatttaaaaaaagaggtcttgtttgtttattaattaagcggttgtcgccctttaccaatgcatgtgtatctattaaaacatctttttcatcatttactaaaacttttccatcatcaattaaaataatcatatcagcaattttatctaaatcagatgtaatatgagtggaaaaaaatacgcttttccccggctctttcatgaaatcaaggagaatatccattaattcactccgtactaatggatccaagccacttgttggttcatccattattaatagatctgcatgatgggatagggctaatgcaactgcaaatttcattcgcattcctttggatagagtagagattttttgttctagatttaagttaaactttttaatataattttggaaaactgtttcatcccattcagtgtaggatggagcaataacatttttcatttcctttactgttaattcatcataaaaatagccctcgtctagcacaataccaattttgtttttagactttctttcatgcttatccatatcttttcctagaaaattaattttcccagaatcttttaaaataagacccaaaatcgctttaattgtagtggtctttccagaaccatttgtaccgataaatcctgttatacagtctgtattaagtgaaaaggtaacatcttttaacgaaaaatttccgtaagatttatttaaattatttacttctaacacaacattcatttttcattctcctcctctaaaattaaatctaaaattgaatggagatcatctgcatgaatacctatactacgagccatttgacaaacttcagtaagtttaacttctaccatccggcgtttggactccattaacaactctaaatttgtaggagctacataggtcccttttccaacctttgtaataataaagccttctgtttctaattctgcataaactctttttgtagtaagtacacttacatgtaagtcgttagcaagtgagcggattgatggtaattgttcaccctcttttaattcattgttaaatatggattccttaatttgctcctttatctgttgatataaaggcagacttgatacattacttaagactattttcattaaacaacctctctatcgataagtgttatgttatgtaatgcacaccatacacaccatacacagttaacattataaattataaaaagcagtttaacaagatatactgcgattaaataacttttcataaataaaatttttagtatcagttaataaagatatttgttattttaaataaaccaaaaagaaagttttgtaaatatatgtcacaaaatattaaagaaacacacacaaaatgtttaaaattttttgattgtttttagaaaacatagggagttatactttagtcgcaccacacaatacagaaaagggggtaggtcaaatggaaacaccagtagtacaaccaagggactggacttgttggagttgtttagtatgtgcagcatgttctgtggaattattaaatttagttactgcggcaacaggggctagtactgcaagctaatatcctttcagaagttttttggttaaaagcactaagagaatgagcacttttggtcaaattagactttctaggagaaaaataaataatcaaaaaggagatgttctaaatggaaacaccagtagtacaaccaagggattggacttgttggagttgcttagtatgtgcagcatgttctgtggaattattaaatttagttactgcggcaacaggggctagtactgcaagctaatatcctttcagaagttttttggttaaaagcactaagagaatgagcacttttggtcaaattagactttctaggagaaaaataaataatcaaaaaggagatgttctaaatggaaacaccagtagtacaaccaagggattggacttgttggagttgcttagtatgtgcagcatgttctgtggaattattaaatttagttactgcggcaacaggggctagtactgcaagctaatatcctttcagaagttttttggttaaaagcactaagagaatgagcacttttggtcaaattagactttctaggagaaaaataaataatcaaaaaggagatgttctaaatggaaacaccagtagtacaaccaagggattggacttgttggagttgcttagtatgtgcagcatgttctgtagagttattaaatctagttactgcggcaaccggagctagtactgcaagttaaaattttaaaatgtgagagtgtttatggtgaaattaaattaggacttattctaatgacaaacagttatgttaagaataagtcctatatatttatcgaaaacgagtatgggatttttgtaatacataaactaaaaacaaatttaaattttataggagatgattaaagtgaatggctatttattttggaaagaaaagctagaaataagaaaattcacatcaaattatgaatctatgttggtagttcataaaaacccaaacgaaagcgctcctacgcttaaaaacgaaaatacatttacgataaataaaaccgccactgaaattattgagttaattgatggtactaaaacatatggacaagttgtatctttcttgtctttaaaatacagtgaagatccaataagtattgaaaagaaattaaatgcatttttaaataatgtatccaaagtttacaatatgaacattggtacgcaagaagaacctataaatgtaccagttaatttaattgaagaacagactatatatccaaaagtggcttcaattgaaatcacaaacagatgtaatgtaagatgtcgtcattgctatggagattttggagcagtaaagccaaaagtaatgagcttagatcaaataaaatccttattagatgacttaaataatataggagtgaaattaattgaacttacgggcggtgatataacagtacatccaaatctaaaagagatattgttatatgcacttaacttggatttttctcaaataacactgttgaccaatggtatagctctttctgagaaagttatggacataataataaaaaataagtcgaaaacatttgtgcaaattgatatgcatagcttagatgataattatttgacttggttctttaaagttcctaatacacttcataaaattaaaaataacataatgaaattagccgaaaatgatgttcgtttgcggatcgccacaatagttacacatttgaatgtgcacgaggtagaagatatagctgaatgggtacataatttagggattgatagtattggggtatctccagtaataccaatgggaagagccttaggatgtagtgatctttatttaaatgaagaggatgttaaaacatatggtgaagcattgttgaaaataaataaaaaatatcctaaatttgtttcattatatgaaggtgcgcgcgctgagattaggaattgtggtgcaataacatcacatattgtgattgcgcctgatggtgaaattaaaatgtgtactatgcatagtttagatgatttgaaaaacagtataggtaatgtttttgaacagaatattaaagatatttatgacgaaaaattcaaatacattaatgcattttttaacttgcaagcacctcaaatggactctgaggaatgtaaagagtgtgaaaataaacgtttttgtagtacatgcttcttaagaagctttataaaagcacaagaaattggcgataaatgtaaatggtttaaaaatcatgtccctgaaataattaaggagccattaatggtagggcaaaattagtatgattggatgagatgaatattgttaagtttctgaggataaaccaatataattccatagacaatgcgtcgggataaggtctcaagatatctatggaattatataaacctcattatattgattcgtaaattaatataataaatagacaaaggaggagaaagagggtgaataagaagataaataaacaagatgaaattcaaatttcttataaagagttattatttttatatccgtatttgaaaaatacaaaaactttgttagctcttggtttaattgggatggttatagcttctttgattatcgcaccgataccatatattattggctacattattgataaagttatactattaaacaaaagctacgatcaattattaaaaacaactcttatactcttattaatttattgtattaactatttaatatcgataggttatgagtatttatttactcgtgtacaacaaaatgtagttaatgaaattcgattatctatgataagtaatattatagatgcgcctctttcttatattaatcagaaggagaaaggttacattcttagcagaattgctgaatctggtaatgtaagtgcattattttctccaaatttattaagggttttttcaggtatattcgattttttctttgctttatttataatgtttaatttaagtgttaaacttacaggtatcatagtaattattatcccaatatattttataatatccaaacattcttctaaaatgatatcaaaaagtaccacaaacgtatacgagtcatcggcagtattaaacgcagaaatgtatgaaaccttaaatggaatagaggatataaaattattaaacggtaaaaatatacaaaccaataagattaagagtaaattaaataatgtaattaaaagtgcgctaaaacaaagtttacattttattttctttatgcaaaatttaatagtaacaaataactttgttacagtaatagtattactggtatcaggtattttaattttacaaaaccagcttactataggggtgtatacttcattttcaatttatatggctaaactccttgcgactacccaagctttaggcagcttagatataactctaaaacccgtgtgtattagtattaagagaattaaggagttcttcaatttagatgttgaaaatacactaggtacaaatataatgaaagaaccaattaattcaatagaatttaaagatgtttgttttaaatataatggaaatagtgatttgatatttgatcatttaaacgtgcaaattgaaaagggtgacaagttattaattgatggtataaatggatcaggaaaatctacctttataaaattattaacaggtttatatcaacctgaaagtggaaagatattgataaataatattgactataacttaatacataaagaaagtgttagagatagaataggtatagtttcacaaaatatatttttgtttaaaggaactatattagataacatattatatggacaaacaaataaaacgaaagaagatgtagttaagttaatgaaaaggtatcatttaacatcacatctcaacagatttgagaatggattagatactataattgtacaagatggttccagtgtttcaggaggtcaagcacaatttatagcctttttaagggctatcctcacaaaaagggatataataatattagatgaagcagcatctaatttacatattgatacaagaaatcttatgtatgagatacttcaaaattacaatctttgtaatatattaattatgatttcacatcagcaagatggcttgtattttctcaataaaacattagaacttacacatggtaataaaagaattgctttaaatggtagtatgctttaatcatcatgctttcatagaagggagcatcctaattatgtcaaaaatgaaacttattaattttgatacatatagaaattcaatagttttatttgagaacaatggcgagattatatcagtgtcagctcattttcaattttttgaaggaagtgaaagctatattcaaggttttattgataatgaagaagttattcactttaaatctaataatcctggtccgaatatttctatatatcgatttgcgcctaagaatattaccaaattaattatatcaagtgaaaatagaacacatggaatggtcacattgtatacttcagaaatatagctaacatctaaattttttaatagttaatacgatgaagtcttggattaagatcgcttgtataacattatttgtttttaaatagcagctatataatcaaaaaaaaggaatcctttattataaggtattcttttttttgattataatattaaatttattatagggtttctttacccatcggcatttaactaaagcgaaattgtaaacctaaaataaaataactttatcctttcctataattctacagaaagaaaagtgtattttttgcaaaatgcatgtgatgtcacgaataattaaaaggttattcaataaaaagcttactgccgcatttaaacttattgaaagtaactaatttagttatatatcaatcaaccacgtccagcttggaaagatggatatagcgacataccaccatcagcaaacagtgtaatacctgttacatagctcgcttgtgaagaagcaagccatgctgctaccgctgcaatttctttcggttctccgatatatcccataggaaccatactttcaacatcggcacgtttttctggatccgcaaatttttcagcattaatcggcgtattcatagcaccaggcccaatattatttacacggattccttttggtgcatattctagtgctaatgtttctgtcattagcttaacgccacctttacttgctgcatagtgtacaaataatggccatggaatttgctcgtgaacgcttgacatattaataacactacctttaatatcatgctcaacaaaatatttaattgcttcccggctccctaagaaagcccctgttaaattcgtagcaattaccttattccaatcacttaatggcatttcatgtgaaggtactgaattttcaatacccgcattattaatcatgacatccagtgtaccaaattcttccacagcagatttaacgagattgataacatctgattcaactgttacatctccttttaccgcaatcgcttctccacctgcttgtttaactacttgtactacctcatttgcttctgattcgtttgaataataattaattacaactttggcttgttcttctccaaaacgaattgccatcgctcttcctaatcctgtggatgcacctgtaataacaacaactttcccttttaaatctgtatacataattttttcctcctttttatcctttagcaattcctaacataatgccagctgcaataatgaagataattccaatgacaatcgcaataaattgtcgttttgttttcttttcacctaatataaaaattccacctaaagttgagatcacgatccccatttgggaaagggaaaaacttgttgccacccctacacgcggctgggaaataaataaaaacatatttcctgctgcccaaattaaaccaggaataatattgtgaatcgcatatttattaaatggttgatgcttaaaggttagtagaattccacctaacaccataccaatggcttgtggtaataacgctgaccatccgtctataccgaataggcggataattaccacatatactaagtaaccaagagttgaaattaataacatcacaatcccttttttgaaatttcctttttgttcatcgtttttctcctctttgctttggagggatgtgagaacgattccgattatgatacaaagaagtgccagaacacctaatacaacagatgttgttgttgaccattcatgaaatacaatgaccccaaataaagtagtcgaaactaattgcatccctgttgaaataggcattgttttagaaaccccaattaaatcaatacttttcaattgattggcttgtcctaatgcccaaaataggccagatataatcccgataattatcaccacgggcgtcaaaacgggttttataaaaatataaacaccgatagaaaaaactagagcgccaagggtagttccaagtatttgactgtaaggaccgcctcctagtttaacgttgaagagtacaatacttccccaaaataaggctggtaaaatcgctaataaaatatccatttttctaaccttcctaaaacatatttattaagttgaatgcttgtacgagatagtatctttgtgtcgagggaattattttagaataagagaagtttttctacccgtaatatttgtttacccaaaataaaagataaataacatcatgttgaaaaagaaaataactagcacgaaataaaaaaggttattagaaagaatatgaccaatacaatttcaagttttgaaaataggaataatggagaaaaacttgatgcaaaattaaggtatgttatacaaaaacaacgcattatgtttatacatgagaaaaagaaataatatcgtaaaatctttaatttcatatataaatttaataagaagtatgatatgatgaaagtaacaaaatacatctaaaactatcttgcaaaaggacacacctacgcatacatatgcgataggtgtgtccttttttatttgtttttaagatttcaagactgaaaagggggatgtatattgtgtaccagtaatatagcatctactaatgtttcttttgaaaaattgaaaagtcaggaagagaatgaaaaaaacatagtgtcaatatgcccgaattgtaagaaacgctcatttagagtactttataatgattatccaaaatggatacagtattgcctatgttgtaattatcgagaagtaaatacaatagagagtccgtttgtttattagatgtagctatttacgtattttgattaggaggaagaatttccgatatgaaaatatgaattaaggctatttgtataacatcatttgtatttcaaatgacagcatgtagcaattcgacgcaaacaaaaaatgattcgagacctgcccaagcagtacaaaacggaatacaacagcacgtaaaagggaaaggtattgttgatattccagggaattataaggggaaattaaaagacttagagaccgttaaagggaaggtattacatataaaagacggagatacaatagacgtaaacgtaaaggggcagaaacagatggtaaggttactgttattagatacccctgagtctgtatctcaaaaaattccaccacaaaagatgggaaaagaaccatcttcctttttaaagaaacagctagaagggaaaagtgtaacatttgtttatgatcggggaccaaaagaagacaaatacggtagaaaattggcttatgtattttgcgatggaatacacatcaacgaattaatggtcaagtcgggttatgggattatagcctatatttctagacctaatactacaattctatctgaaatgaaagaagcagaaaatgaagcaaaagaatcaaaggttggcgtatggagcattaaaggctttgtagatgaaaagaaccagcattataaccgtaaagatgcagcttaacaccctaacccattgcaatacaaatatttgtgcaaaatggaggttttttgaatgaatgaaaacaaaagaaatatgctcttatcctttattatttcaattttatttattttcgcgagtctattgccatttagtaataatgaatatgtgtatgttatctccaaaattggtgctgcagcaggtgtaataaatattgtgatgatgagcgttttcttgtattttcaaagcaaaaaaacgggacatttattaaattggtaattaaagctaaatagttttccttactcatatccttttaagtttggtaaggaaagccgaaaaggagtgtgaaaggtgagtcaagtacctggatttttaaagtttgttttagcgaaagaaagacggtatgtatatttagttgtaggagaaaagaaaaacaaaaaagtacttacacacatggtatatagatttggttcgctagaaaaagcattagaaaccatgtacgaaatgcgtggtgattttgaaaatcttttccctctagaattaaaagagaggggatacgactgagaagatatcaatgattggatactttctattgaaacagggtactcgaaacacggaaataaactagtcatatactagcaaatgttttgtattttaaaaaataggtgaggcgaaaataagatgttgatcattcaaaagtatcacattgtaattgcttggacgatagctactagtgcaatgttaattagtttgttttttagtgaatggatgaagctgccgccatgtgatttttgctggtaccaaagaatggccatgtatccattagtattaatatgggggtagggatatatagaaaagattcgcacgtaagcacgtatgcatttccatttgcgtgtatcggtttaatgttatctgtatatcaaattacaattcaagcgtttcctaatagtgagatgcagatttgttcagtaggagtttcttgcacaaaagattacttaaatttattcggtttcatctcgatacctatgctatcttttgttggatttttagctatcataatacttctatatattaaatctgagagagacaaaagaataaacaatacagcgattatgaacaatatgctcgaataaacaaaaaatacctataaatagataaaaatataaagaaattaaaaaaggagaaataaaaaatgacaacaatgcaagtaagtaatgaaatgtacaaaattccagaggcagatatagaactattaaaaatcatggcccatccagttagattacaaattgtgaaggagctagaacaccacaaaatttgtaatgtaacacagttaacagagctattagatgttcctcaatctaccgtatctcagcatttatctaaaatgcgtggaaaaattcttcgctcagaaagaagaggattagagatgtattatcatattgtgaattccaaggcatgtcagattgtcggagtattaggtatttaattctaaatcgaaataggatgatagaaagagtgttgttaaatatagctgcaaaagatgatgtactgcagaatgataaattcacaagcttaaagtttagtccttctaataatggaggagctgactgtggtgaaaaattgatatagaggttactaaaaaagagtgcagtacatgtctgcattctttttctttgtgccatagctataatagataaagtattttgttttgtatgactctgaataggggatacagtgttttgctatgcgaaaacgatattttcgactttttaagcaaaggggataattagtttattgatgtgtatagtatgaattaaggtttagaatattctgtgtcaatattatcaatttactatagtttccaattatgtaaaaatagaattgattataattttccgtaaatattagattgaaaactattataaggggaatgtgagtatttatagctgtttataaacgatgattggggatacagacaatagggtgatcaagtactggtagaatttatcaaacaaaatgaggtgactttaacttgagagaaattgcaaaaaaagtaaaaatgatacgtttacaggaggagcattccgggcttaaggcagacgcagaacagtattcttccaagcgatgtaaaatagaaagagagggtattaatttagaaaaaaatagagttaaaaaacgaactcaaaaatttcaaacgtcagaagaaaaatgggacataaaatgtaaaaaagcagtacaattatttaatcaaggagaggaatatccaactattgcaaaaaatctgaggtgcaatgtgagtagtttgtatagagaacttaagaaacggggcacattacaaacaccaaagcaggtagcagtatctaaatcattaaaatcacccataacatcaacacgaacaaaaaaaacaaactttgagagatataaagaatattatatgtacaaatagaagaattcatggctataaatctatacttaattctttagtgttaaaaagctcagattataaaaggtacaatgaaaaaatgcatgtttagcagcaaatcttcttacagtattgatagagcatctttttattttttaggatatttttaaatctaacaaatattgaaggctattacctgttgcttagatcaaaaaaatattcttaaaactaaatccttacttatatttgttgagtagttggttaagaagaggtttttttgcaaatgctaaaataaggatactttgtccaaagcaaaagaatccccatgtcataaaggattcttttaggagagttagagagatgttgtcacttgactcatattgattttacgataaaaagaaagaatattcaaatttattatatatttctcaatatatttcttttatttttatattataattaattctttttattgatgtatatctttctgtggtgaatccttttaataaggattccttttttagtggctcatatattaataatgagccactagagtttaagatagtttatacaacaactattgaaattgcttgattataggggaattgttgatttctattgctggggatcagccctgaaaatttatctacagtaataatgattacaggtattctaacttcgttgattagaaaatttgttattactctttttaaatattttaatctttttaagtttctcttatagatgtaaaaggtttggtgtaattataatgtttttaacgaatttccggaaagaattctccttcctcaagcgtgtgaagggcgtagcccaacggtaggtgggagatgaatttcggtttggcgtagccaaaaggttttcctttttattttgcctctgatataatcagtcttataaattataagggctggtatataaatgaaattagttgataactttaaacgtttatattttttagttgacatattaccgcaggtctaaataattaagtttggatgatgatgagggaaatgaaaaataaaaaatccctcttttcatattgagaaagagggatttttacgtacaagttatgcacccgtatataaacgaagtccctcattctatctttcaagcataaagcttgcaggaagtggcacagtattcaaaatgaacctgttgccgaggtttcaaagggccagtccctccacctctcttgatacaatgagtaaacgaataaattttattaatttttgtgtttctttgataattcaaaatcttacaccttgaataatgaagtgtcaactaaatgaaatatagtttaaattttcagttttattaaacgaaaaaaccactgcatagggcagtggtttttctactagaagttaaagttatctggatctggaccaacgcgacgatcttcatttaaagcttgaattgctttcatatcatcagcacttaattcaaagtcgaagatgtttgcattttcaataatgcgatgttctttaattgatttgggaattgttacaacttcgttttgtaaatcccagcgtaaaataatttgcgcagttgatttattatattttgtcgcaatttcttgtaacgttggattatctagtagttgtccttgcattaatggtgaccaagcttcaagctgaatattatgttctttacagaatgcatgtaactcttcttgtgctaaatgtgggtggtattccacttggttgaccattggcttaatttcagcaatttcaaatacgtcttgtaagtggtgaatgtggaaattactcacaccgatagcgcgaacacggccatctttataaagtttttctaatgctttccatgattcggtatatttcccttttacaggccaatgtactaaatataaatctaaatattctagacctaatttctctaatgtagtttcaaatgcttgaagtgttgtttcatatccttgatcgctattccatacttttgaggtaataaataattcttcgcgtgaaacaccggattcacgaatcgcttgtccaacaccttcttcattttgatagattgctgcagtatcgatgctgcggtagccatttttaattgctgcttttacagaatcaattacttctgaaccatcttctactttaaaaacacctaaaccaaaccaaggcatttttacaccgttatgtaatgttgtatagtcttttaaacttgttaaaatcatattatttccccctagcttttttgtttgttgcttctactgctttttgaattgcctctgaaaaattatattcgtataaagttttgagaccctcagctgtggaaccacctggcgttgttacttgttcgcggaggttagctggattttgcgtttgttcgagcatagaagcagagccagaaatcatttgaatgacaagatgttttgcggtttcttcatcgactccataactttttgttgtttcaattaagctttcagcaaagtaataaaggaaggctggtgcacttccagtaactgcagtaagctgatgaacttcttcctcagtacaaagttgcgaagtaccaataccttttaaaagcagttgcagggtttcttgatgcatctcatttactgattgtcccattgtatataaggagatagattttccaatttcagcagctgtattaggcataatccaagcaacaggcgtgccctttgggagtctagcttctaaataagatggtccaatgccagctgcgactgttacgactagttgatttgatattaacggagatagctcagctaataactcttcatgagcagaaggtggcattgctaaaacaaccgtatcaacagatgtaacatgctgtttccaatctgttgcagtagacacattatatcgatgttgtaactgttttagcttttctacgttgcttcgattagagacgataatttcttcgatgtactctttgcttgttttaagtaatccggaaaatatagcttctgccatacgaccggcaccaataaataaaattcgatgtttagttagcatattctttattcctttctagtagagatatgttataaaaacgatatcatctttaagagaatgttgtaaaaagaaaagacttaccgtagatggaatggataatgagaaggcggaaattcatgctaatattaactgttattaatctctttatatgtgtagctggtttgctagagtggaagagcaattataaggggcaagaacatacaaataattatatctagaaaataattagaattgaaaaacccctgaagcatatatgcttcaggggtttactaatagaatataagattatgcttttgtcataccaagtaatacagcgccgccgataattaaaacactacctagtgcaataaagatcaattgacgttttgttttcttttcacctaagaagacaatcgcaccaaatgttgagataacgattccagtttgagataatgggaagcttgttgctactccaacacgtggtaatgaaagaagtaagaataagtttccagttccccatagtaaaccagacaaagcattacggattgcatatttgttaaatggtttatgtttagacgtcagtacaaccgcaccaacaaacataccaactgcttgtggtaaaatagcagaccaaccatcaatattataccaacgaataataattacatatacaagatagccgaaagtagaaacaattaaagtaagaagtccttttttcaattgtccaggtggctgagcattttctttatcatctaatgatgtgaatacaacaccaactacaattaataggattgcaatcgttcccagaatgatcgttgtagtagtagtccactcacggaaagcgataaccccaaagatagaagttgcaacaagttgcataccagtagaaatcgttacagtagttgaaacacctagtttttcaactgtttttaattggtttacttgtcctaaagcccagaataaacctgaaataaaaccaacaattaagattgtcattgttaaagctggttgagtaaatacatacataattgttgcgaagaatagagcaccgattgtcatacctaccgtttggctatatgcaccaccgcccatttttacgcttactaataagatgtttccccatgcaattgcaggaagaagcgctaataaaatgtccattacaagactcccttcggtttgctataccaatatagttacatatcgttctaacgatcggtaatgccccactaatagagtagaagattaccgatcgctaaaacaggatgaagaattcacaatataaatgcgttttcatttcttcattttttgaaacacctccatataataacaggaaattgcctattttagaaagtgaattcaaataaaatgtatatttaaataagaggtaaaattcagttatttcccattggtatattttatttcctaagaaataaagaagcagcttcgacaaaagctgctttaagagttagtgattcttttattaataagttgaatacatagtagaaatacgagtgacataccgatagtaataactacaagtgtccaggcgagttgcatattacttgcatcaatagccatgtaaattgcagttgggattgtctgtgttttaccaggaatgttcccggcaaacatgagtgtagcaccaaactcaccgagcgcgcggacaaagctcaaaatcatcccgcttagtaaggcaggaaatgcgagtggaagtgtaacgtgcagaaaaacttgatattcacttgcgccaaggtcacgagcactttcttcaatttgtacatttgcgatagaaaatcccgttttcgctgattggtacataagcggaaatgcaacaactgtagaagcgataatcgcagcagtagatgtgaacataatagactgctgaaataatgattcaacccactttccgatcgggctgttgtttccaaagatgataatgagaaagaagccgataacagttggtggaagtaccattggtaataaaaatatggtttctaatagtactttatatcgccatgaggagcgagctagtgctcgcccgacaattgtccctaaaattgtaacgagaatagtggcgcacgcagctactcttaaagatagaaagacaggcgataaaatagcatcaatgctcatagtaattacgacagaactgtaaatccatatttcttaaagatagattgtgcatcttttgactgcaaatactcataaaatgaagtcgcctctttcttatgtttagattcctttataacacctaaaggatagtggattggctcatgagaagtagctgctgctgtctcaccaatctttactttatccgaaatgagagcatctgttttgtatacgatgccagcatcgacattccctgtttctacatatgttaacacttggcgaacatcttttgtaaatacgactttattttgaacatcattccaaaggttttcgtgtgttagagaagcctttgcatatttgccagcaggtacagattcaggtgtaccaagtgcaatttttttgattttctcatcttttaaatcttgaaattttgtaagtgaactatctttagggatgactagaactagttcatttccaagaagatttttcccttctttttcactaatgaatcctttttttacaagggtttggaatttatcttctgctgcagagaagaataaatcagcaggtgcaccttgttcaatttgttgttgaagtgctccagaagcaccgaagttaaaagaaagtttgatatttggctctttttctttatattgtttttcgatttcttttaatgcatcttgtaagcttgcagcagctgagatagtcagttcaactgttttatcctctttagcagctgactttgtatgcttttccccacttgtacaagcagcactaaatataagaaggaaagaaagtataagtgccccgatggaacgtaatgtaaatttattcataaaaaaatcccctttcgttttgatacatctaattataactaattatatctaaatataactagttataattgaatgtaatttgaacatatatctatttttaaaaaataggagaaatattcttttctttgttacaatgaaaggagaaagtgaggaatcgtctatggatcatcattcctacacaacggaagaagtagcaaagcgattaaaagtatcaaaattaactgtatacgacttaattaaaaaaggagaacttccttcttatagagttggtagacagatgcgcattgatgcaacagatttagatcaatatataaaacaaatgaaaacaggaaaggtacaagttactcctgtaaaaaacgatggtagtagtatcttgaacacgtgtattattagtggtcaagaactaacgttagatatgttagctaaacgtatagaaaatcgtttgccaagttctaatgttttaagggcgtatcaaggtagcttaacgagtttagtgaaaatgtatcaaggagaaggaagtatcgttagtttgcatttgtttgatggtgaaactggtacatataatgttccttacgtaaaacgcattttagtaggacagccatgcattatgattaatttattgtccagaaatgtaggattttatgtccgaaaaggaaatccgaagagaataaaggcatgggctgacatatccgggtccactataaagtttgtgaatcgagaaaagggttctggtattagagtgttagtcgatgaacaattacgaatccaaaaattaaataaagctgatattagtggatatgaatgggaagaatcgaatcatcttggtgttgccacgcaagttgcaaatggaaaagctgatgtaggagtaggttcagaaaagttttcgcaaattgtaaatgtggactttattccaatcatgaaagaacagtatgatttagtaattttgaagaataaagaaaatgaagagttgattgaagttgtgaaagacattctgcaatcggaagaatttcataatgaattaaatgcgattggcggatatgatattacgaaaacaggtcaaattgtatatgaaacaaactaaaaagctgcttgtctataagacgagcagctttttctatatataaagggggttggggaaacaaagtgttaaacaagaccttgagcaagtgtataaatgaaagccgtaagaagagtggctccacttgcaagtacgataaagtctgatttgttgaaagtaatgttgttcattataaactctccttatttgtttaatgtagttgcaacagcttttgcatcgacaagtgcggatagcaccatgcccattgtatttaaaaatttatttgatttcatattgttcatcatgcgtatccgctccttttcgaattgttgttgccctgcttatgtcttaattataggaaatatggctacttgcaactattgaattagcttacgaaagacttacacttttgtaagaaaaaaagacattcatgtaagaatgtctttcacagcatattgatatgatgatggtcttcaattgtttttaaaaaactacgcattgaattcgtcatatagctatctttacggcgtatgaaaaccgttgaaatactgccgtatttttcagggattgcatgacaatgtaccttacctgctttagaaagatgatggacagcagactgtggtacgagtgtaattccgaggccgagtgcaacgctgtttaatattgtctctaatatattgaattccataattctttttggtagcaaaccttcatctttaagccaacgttctagtttggagcggtatccacatccttggttaaaaacgagtagaggagttgttgtaaattcttctatatgaaaggctttattttgtgttataagcattaatttctctgtactaacatcgtattgttcgattagtggatgtttaataggacctgatataaaggcgccatccaattgatgatcaagtacttctctaattaattcttctgttagacccgcttgtaatgataaatcgacatttggatagcttttatagtaagaagataaaatggtaggcagtgtacttactgtttcgactgtaccgattttcaatataccggagggtgtttcgctatctaaaaatacttgttttagttcgtcgacatcttgcaaaattttactaacataaacgagcatttttcttccttcagctgttaaagtcattcctcgtttatggcggtaaaagagtggggtttttaattcgttttctagttgtttaatacgtgtagttacatttgattgtacataatttaattcctttgctgcgctacttacactaccctgatcggcaacgcttttaaagatttgtaagtctcgtaattccattttgtaatcccccttgatgttaactatcattataaatgatagttaacatcattttgaatcattttacgtgatatattttttcttttacaattctctttgtgcaaatagaaagaaacgggggattgcggtgagaagaggtcaaatgataataggggctgtagcgtgtttaattgcgagtatgtcatggggagcgatgtttccagttgctgatcatgcgctagaatacatagatccattttatttttcgcttattcgctatggagcagtggcgataatgctgattgtattgttgttagtgaaagaaggaaaacaggcatttcgtttagagggaagaggaaagttactcgtcttttttggaacgatggcatttacagtatataatgtcctcatatttttagggcaaatgttgatgggtaagtcgggtgtaatggtagcttccattatggaagcacttatgccgatgatttctatttgtattttatggggatataagcatataaaaccgaagaagtatatgataacgagtatggttattgcttttgtaggagctgtgtttgttattacaaaaggtgacatgagtttctttgtaacattgaaagataatatgttcccattagcatttatatttattggtgttataggctgggttatttatacgatgggtggtcaaacgtgtagtgattggtcaacattacgttattctacgttgacgtgtgtattcggtacgactgttacaggaattataacggtaattattacgtggcttggatatgtttcagttcctagtatgggaacgatttctattgtaaaatatgatttgttatttatgatgacattgccaggtattgtagcgctacttgcttggaactacggtgtgaaaattttatcatccattaatgggattttatttattaattttgtaccaattacgactttagctattatgatgatgcaagggtatcaaatcacaatgtttgatattatagggactgtacttgttattgcagcacttattcgcaataacgtttgccagagaaaagaagaaaatataaataatagagttttacaagaagaacaattacgtcaagctgtttaataggcaaatggaggatttcacatgttagaaagtttattgtttttcttcgccgtcggagttgcctgtgagcttgcagcaattaatcgaaatggtcgtaaaaagataaaacaacaagctgagctgatacagcttttaaaagagttgaaagaaagaaaaaattaaaaagacgaccgggcatagacggtcgtctttttctatataaaggggaaaggggacacaaagttatacaagcgtagcagcgtaaataaaagcagtaagaagaagagagccgctagctaatcctaaaaagtctaatttgttaaaagtgatgttattcataatacattctccttacttgtttaatgtagaagcaacagcttttgcatcgaaaagagccgataataccatgcccattgtatgtaagaaattgttcgttttcattttgttcatcatattaatcgactccttttcgaataattgttgccctgtttctgacttaattgtatgaaatatagtaagaagtaactatcgaattagcttacaagaaaattacacttttgtaagaattgaaatttaacaattcatacttatttttattaccaactcctaaaacttagtgttataattgttgtaagaatatgattatacttcggatgtttagaaaggaacgaaataaatgtataaaccaattacatttttgttgaaatatatatttaaaacagctgggaaagtagaagtgcaaggaagagaaaagctaccagaaggtggtccgtatgttgttgcgtgtacacatacaagttttatggatgtattaatgttagctacagggatgtacccaactcaaattcattacatggcaaaaaaagaattatttgaagggaaattcaaaaattggttctttaaaaatgtaaatgcattccctgtagatcgcgcgaatccgggaccgagtacacttaaaattccatcacgtttattaaaagaaggaaaggtagtagggatttttccgagtggaacgagatcagcggaagatgtttcattaaaagcgggtgctgtgacaattgcgatgcgttctaatgtacctttagtgccggcagcttatgttggtccatcaagtgtaaaagaattaataaaggggaaaaaggcaaaattgatttttggagatccgattcaaattgaggctggagaacaaatagatcgaaaaaccgctatgaaaatgatgacagatcaattaaatgagaagtttgaggagttaaaagaagctttgcaatcaaatcaaaaataagaaaagacgaccgggcatagacggtcgtcttttctattactatttataataaaggggacacaaagttatacaagcgtagcggcgtaaataaaagcagtaagaagaagcgagccactagctagtcctaaaaaatctaatttgttaaaagtgatgttattcataatatattctccttacttgtttaatgtagaagcaacagcttttgcgtcgataagagcggaaaataccatgcccattgtatgtaagaaattgttcgttttcattttgttcatcatattaatccgctccttttcgaatagttgttaccttgtttctgacttaattgtatgaaatgttgcggaaagtcactatcgaattagcttacagaaaaattacacttttgtaagagaaacaaatgaaggtgtaatgataagaagatttgacatatgttcatgagattcattaacttaaagatagaggtgagtgcatggctaatattaaagatatcgcaaagatggcgggagtttcagttacgactgtttcgagagtgttgaatgatcacccatatgtaagtgaagaaaaaaggaaagcggttatagagatagttgagaaattgaattactcgcaaaacgcaaatgctgttcatttatcaaaaggaaagacgaatattgttggtgtgattttaccgtatattaatcatccgtgttttgatgcgatggtgagcggaatgatggagattgcgttaactcataattacagagtgttactttgccaaacgaattataataaaaaagaagaaatgaaaagtttacatatgttaaaaacaaaacaattggatggtcttattatttgttcacgtgcaaatgattgggaaacgatagaaccgtatgcttcttacggcacaataattgcttgtgaagataatgatatttcaaacatctcaagtgtatatacgaatcattcagcggcctttcaattaggaatggattatttgattgagaaaggttataaaaaaattggctattgtacgggaagaaaattagggccgagtagtcaaaagcgttttgatgtttataaacagcaattgcaatctatagatgaagaggttaacgaagaatggatttttacagaatgttttacactagaagatggtgtaaaagtggctcataagttaaaagagatgcaggatcttcctggagcattaatagtagcaggtgatgaagttgcgattggggttatgacagaggttgaaaaattagggattcaagttcctgaggatttagcgattattggctttgataatcaacctatctcgcaagtgttacaattgacaactattgatcaaaatttaaaggagatagggaaaactgcttttgaaatgttgcatagaaaagtgaatgacgagagttctaaacaagaaaagctggaaattccatacgaacttgtggaacgctctacagtttaatcttaatccgttatgtgtataatcgcataacggattatttttttgaaatatctttgacaggaaacgcgtttcatactttataaaggagttaaaccggtctgtaatatccatggattcttttcaagtgttaaagcagtgaatagaatttggaggaatatgcatgaatgaacttttatcgagtatgaaaaagtatgtagatgatgatgaaaagattttagtttttgtggtagggatctttgagaaggataatttcatgttatgttatcaacatggaatttttgttgccactactagacgcctcctgttttacgggaaatttccttactatccttcaacatttaaagagtactcatatgtgcatatagatagcatagattttcatccgtactttgagtttacttgtaatcatgaaaccattcgcgctaagtatattcagaaagggaatgtggagcaatttgtccgtgcagttagagcaaatatgaataattaatcaaccctctgtttaaacataatatttcaatttttaagagggaaaatgcggaataaaaaccacttctaaacctctaggagatagtgatacaatgtcaaatggggggagggtatgaactatggttaatcaacgtataaaggaaataacactaattacaattggttcattattattcgcaattggtattaattactttgcaattccaaaccgtttatcggaaggtggaattattggtttaacggttgttacgtactacttatttgattggtcaccagggattgtgaattttgctataaatgcaattttactagctattggttataaattttttgataagaaaacaatgatttatacaattttagggattgtagaaacatctttgtttttatacgttacagaacatattgagtatcatgtaaatagtgatacattattagcagctttatttgctggtttatttgtgggtattggattaggctgtatgttcaaagccggaggtacatcgggagggtcagcaatcttagctcggttagcaaatcaatatttaggttggagcgtaggtaaaggcgtactaattattgatattgttgtaattgctggttctgtatttataatagggcaagaaaaggcaatgtatacacttgtagctgtgttcatcggagcgaaggtgattgatttcattgtagaaggaatggatacaaaaacggctgttacgattatttcgaatcaaccagatttaattcgtgaagctattacgaaaaatatgacacgcggtgttactgtattagaagggcgcggcggatatactggtaaaaataaagaagttttatatgttgttattaataaacaagagcttgttaagttaaaacaagttattagccgggtagatgaagatgctttcgttgttatacatgatgtacgtgatgtacttggcggtggctttaaagcaagctaaaaggtgaacgagtaaattcgttcaccttttttaattcttacaaaaatgtaagtgtaatgtaatgagattcaatagtagattttattccccctttttaaaatggatgtatatatatcctgcagaggaggaatgtttattatgaagaaaaaaatgatcactactataatagcgatgatagtgatagtagtaatgttactgcctacgaaacttggaccggttatcgataaatataatccattttataagacgaaagaatactatacggttgtgaatacaattggtcagcatattggtgatgagtggtatgaatatgaatttattgcattcgatgaacgtggtagagagcagaaaataaagaaaacggttaagcatatgttaaagagagatgaagcattaaaggtttttgcaaaaggacgttacggtgaatcgattgaagagattgaggttgcaaatattcctataaatgcgaagagtaaacttttaacgatgagatagtaaaatatacccccagctattttttgtcgaaaataaaaataccaggtaagggtattttaggagttaataaaaaagccttagtccatatagactaaggcttttttattatataaaggggaagggggtacattgtagtagcatggttgaaaggtataagaagagtagctactagcaatgcaatttggttatttgagtgttcttcttatttggcttactttctaactttattgtacgaaatataagtaagggaaactatcgaattacattacacatagcttacaaacatgtaagtcttctgtaatgtaattcgatggttaaaagatagtgaattttatatagtgtaattagaaagtctcactgtattactttccgtttgtaatataaatgaagaatgaaaaccaactactttttaatagccctcatctgtatgtagatgaggctctttttataaaccttacaatattgtaaggtttacgtaagttaattcgatagtaaatttgtcatattttttgcataatagatacagatagaaaaataattagggatctagtaagaagggagaaaaatgggatgcgtaaagaagaagtagtgaagttaccaattaaagatttctgtagctactttactgttgccgtagtgtgtattggattatttgatatcataacaaacttaattgttaaataatatagatgctaaaacaagaaaggaagtcctttcttgttttttttatgggggcataaagatgaaatggattgatagtcatatacatgttgatcaatataaggatgaagagaagaacagattactgaaagaggtggaaaatagtaatgaaataaaggggcttattgctgtatctatgaattatcaatcttgtaaggaaacgttatctttagcgaagaagtatccctttatatatccagcgatagggtttcatccagagcaacagattcataaagaagagtgtgaacagatttataaacttattgaacagaacgcagaggaaattgttgcgattggtgaagtaggtttgccctattatttgaggaaagaagatgaaagcattgctgtagatccatacatagctgtattgaaaaaatttatagaactagctagtaagtataatttgccgattgtattacacgcagtttatgaagatgctgacactgtatgtgatttgctagagaaatataaagtttcacgtgcacatttccattggtttaaaggaagtgatgaaacaatgaaacggatgatgaagaatggttattatatttcgattacaccggatgttttacataaggagaagattagaaaaattgtttcgtattatccgcttgaatatatgatggtagaaacagatggaccgtgggaatttcaagacgatgttatgacgcacccgagaatgattcgagatgtattaaaggaaattagtgttataaaaaacatatctgttgatcaggttgcagaaacaatatatgaaaatacaagtcgattttatttgaaaggataggagaattatagttttaatcatgtaacggaaaaagtgaaaattgaatgtatttaataaaatgccacggtttgatatatgacaaaaaaccaccaagcgttccgctcggtggttttgtattaggattctaatttcttcgcacgttttaataataaaagaaagacaatgataacgaaccccagtataaggaagaagccatattgctttatataatcaattatgtcattcgcactggttggtttttcaacgtgaatgccgtctttattcgtcgtaatatgaatatctttcatttttacttcattcttttccttttgtaaatcaatccactctatatttggaatactttctagatcctttaatacttcttttaatggtttcacacctaagtaaggatgataaaatgccccaataatcccatcggataatttagaaacagatagagcacgttctttcattttagcaatagtttgtggcgtatcttcttcaataaatccgactgtttcaggcaatagtttcattccatgtaaaaatgacggagtacttgtataatatggtgagtgcatggatttccaagttgtatcatttaactgtagttgtcctacataagttgaaaagtaccttgataatatttcatatcctttttgagacatcgtgtaatgaggtgcttcaaaggcaacaggatatagtttagcatctacaagttcttgaattcctttttcaatatgatctttcgtatatttcccctcgaattcttcccctttttttacatattggttatatgcctctatatttggaaagtcatcttttgtcttcggtttttcatgcttcggttggcgaattggttgatctgttttgacatcccaaaattcaaagccctcacctgtttcactgtcataaaattggtgagtataaccatgcataataattgctgcaccatcatcttgcatagagcgtaaaagatcaactagttctggtttatcttttaaatgtattatctttcctgtatctggatctttatataccggaataacagtaatcatgtaaggcatctttttctcttttagtaattcagcaatttctttcaattgatttatatctgctgctgggtgaacatcctcaagacgtaaataagcttcaactttatttttcgttggtttttggctgaaataagaaaataacatttcaccgacgtaatgagacatccagtcaaagaggttaggtgttgcaacataataagatatttcatgctgaacgattagtgggttagtgttatttgagcttaaagcgttagcaagcacagttccattcgtatcaaatgattgaattaatcgttcctcttctaaggtattttttagcttcttttctggatattcaattttattaactcgtatatcgtcactcttcaatgtaatgaaagaaaaacgcttagataattgttcaacattttgtcctaatactaatacaggaccggagaagttttctagaaattgtttcgtttcatcagaaaacgcttcttttgtttcaccgatataaacaatatgtgtataggaggatacgttattaattgaagttgcttcttttaagttttttagggttatatcatttgtaaaatgtcctaattgagtattaaggatttggacattatttgaaactttatcgtcttgtgtactatacaaaacaagtacttttggttttgatgatgtttgtgcagaggtgtaggtagggatgagtagtaaaatgctgaacaagagtgttaggcattttttcattttgtacgctcctattctatatatagagttcagtttacaattatatacaaaaaatgcgttatagtctatgaaagttacattttttcacatatttaccagctgttttttcacaaaatcggtctaaagcatgatgataatacgtatagttatttgctatgataaaagagtaatagaatgtaggtaattgtaaagggaaggctgaaaggggacaaatttcagcggagaaagaggtagaggtagtgaagaaattctttgtaggatttttagttgttcttggagtatatttatatttccaaggaaagtctgaaggaatggataagctagtgaatggaacaagctatgttgattcagaagaagcaaaacagatgaaacaaatcattatagaggaagcgaagaaagtaaatcttccagaatggatacctcttgcaattgccgagcatgaaagtcgattaaatccaagaagtgttggagataatggaacttcattcggattgtttcaactacaccgcggcggcgggcttgcaccagaacatttaactgatgatgagctgaaagatccacgtacaaatgcgcaaattgcaatgccgcatttaatgaaaggatataagcgtggggtgcaaaaaggtttgactgattttgcattactgaaatatatagcgaatacatctggatggccagggaatttagggccagagtggacggataataacatgaagtataacatcggactagaagatgtgtactatcgaaataaaggtgtaataaagtgaaactttaatcagtgggggagtctgttcatcccccgctgattattagtcttcaccaatcgggcttttacgagcagttaatcttccgcctaaattctagcgttttccggattttgaggtggaagttttactgctcgttaatgcggggtcaaagagtaggttttctatacctactctgtttttttatgaataatttcatccttttctttcgtgaaatactgcgtgagttgtattttcacctcttctagttttgtagaaacttgcggtattttatatcctacatacaatggtgaaacgacaaatctaggtacaactttacaaatgatttttccatttaagtaataaaagaataagttataactactgcatcctttatggaaatctatcagtatgtaacgtacagtttgctgaatgtaatttgccatttcatctatatatgaaatattatcaatgattatattgaattcagtgaagccaataatgggacgctctgaaatattaagctcaatgcgttcatttttttgaacaattaccccttgaaaattttcttcttcaatattttcaagataatctacatatttcattccgataatttgcatgtgtgcatgatgcaaacttccacctgaaaatggaccgtgatttttgtataaaattacagatgcaaattctgcgttcttctgtaagtgtaaccaatgttgaatagaaaattgcattaattttcgcatatgttcttctgtatatgttgcgatatgatcttcgcaattatccgtttcaatcagcaccgtttgaaatgtatcttgtaatgtaggaaatttattttttaaccaaataatagaaccatcagttgctaaaatatccgttaaatgttctttatcgcaaaatggacatgcagcgcttctattccgaatactttctggtttttgtttaccgatatcgtttaaaaaatatagttgttgtgtatccatttgtatatatgcccctttaaaatatgtgtaaaaatcccgcttaatacattcgggaaaaggagaaggaaatcctctaaagacaatatggaaaaaataaaagacaagatatcctcattacgatagggtaccttgtcttttattttttctctaatagtgtgtatggataatatagaacattttcattatttttcttttttctattttttattgtgtataaagtaattgctgtgcttgcaattataataatggctttcttcatattcatatacccctttttattgttggtttaattcttggctaactgcttttgcatcgactaaagcgtgtaaaatcattttcaccatgttcatcatatttcttcactcctttttatagttcatttagttcttttacaactgcttgtccgttcactaatacctcaaagattgcttttacgatttctttcatcatgtttgtttcctccttgtgtttgtctctcttgttttacatctttattgtatagggaggcatcttttcgtactatcgctttccattacgtgaacataacagttttgtaagatttgatgtcacttattgaaatgtttagtctatcttcattattttcagaaaaatgactattcaaacatgaaattggaaagtataataaagaagtaagtattaaattccgtacgaaaggggtgaatgagatgaaacgttctttagctgcgcgtgccaaatttttagattttatctatttttgtcgtgcgatttttcatgatgtagttgttaacgggatacgtatgcccttttttaacaattgcatagtgactattgaacgatagaaatctcttcacccatttttaataaacgtgtgaaaagggagctatttggcttcctttttctatgccgaaaaccatggggaatgtttctttctcatggttttttatattgaaaggagtacggaaaatgactatttgtagtgtaaataatgtaacgaaatctgttggtggaaacatcatatttgaaaatatatcgcttgaaataaagaatggtgaacgtgttgggttagttggtcgtaacggtagtgggaagacaacaatctttgggcttctaacgggaatggagagtttggatgcaggagccatccatatgaagaaaggtacacgtattggtcatgtcgcacaaattccgaagtttgatgaggtcatgactgtatatgatgtattgagttccgcttttaaagtagaaaaggaattagaaaaagaaatgcatgctctagaaaaaaatatggcggaggagcaggaacaatcttctttgcaaaagctaatggagaggtacggaataattcaagaaaaatttgcatttctcggtggttatgaaatagaggcaaatataatgaaggtagcaaatggcttacaagtaacagacttatttccaagagtatttacggaattaagtggaggagaacagacgaaagtaagccttgcatatatgctattgcagaaaccagatttacttctattagatgaaccaacaaatcatttagatttgtttgcagttgaatggttagagaaatttttaaaagaatataatggaacagttatggttatttcacacgatcgctatttccttgatgaagttgtaacgaaaatttttgatttggaagatggagagattcacgtgtaccatacgaattattcccagttcgttgaggagaaggaagaaagattacttcaagagtttcaagcttatcaagagcagcaaaagaaaataaagaaaatgaaagaagcaattaagcgcctacgtgaatgggcaaatcaagcgaatcctccgaatgaaggattgcataaaagagcgaggaatatggaacgtgcgttagagcgtatagagaaattaaagagaccgattttagaaagaaaacagatgggtcttcagtttgaagggcaagagagaagcggaaaagatgttgttgtaatgaaagaagtgagtaaaggttttgctggccgatctttatttgaacaagcgaatttacatgttcgttttcaagagcgtgctgctatcgttggtcgtaatggtacaggaaagactacattattaaaactactattagaagaaataaatccagacgttggtgaaattcgaattggtagtagtgtcaaaattggttatttatcacaacatgcatatgaaaatatgaagagtaatgtattggaagcgtttagagagtatgtggctgtaacagaaggagaagcaagacatatattagctaagtttttattttatggtccagcggtgtttaagaaagtaacacaactgagcggtggagaaaaaatgaggttaagacttgcgcaacttatgtatcaagacatcaattttctaattttagatgagccgacaaaccaccttgatattgaatcaagggaagttttagaggaagcccttgagcaatataatgggacgattttagctgtttcacacgatcgatattttttaaataagttatttgaaaagacgtactggattgatagatgcaaattatttgagtttgcaggaaattatgcatgggctcgtcaaaagtgggaggaaaagattgagaagcaagtaataaagcagaaacgccaagggagaaaaagtgttgaaacggttcctgtaaaagagaaagaagctaggaatcttgaagagattgaaaatgagttaatgcatgtagaagaagatatatatgcaatagaatgtggaatggaacatgtagctgatgttgaaaaacttgaaaaattatatgaggaaaaaacgaagaaagagttgttacgagcagatttatataatgaattagagaatattgtggagtaatgagtagaaagccacttcctttcagttttgctggaggaagtggctttcttcataatgatattttgctttaaaggttaaatgaagcgatgtgtttcacgtgaaacagtaacttaaataaatccgtgttcctcaatttgcatagcttgtgaaacatatgaaaataataaggtaaaaaataaatgtcattagtggtttttggataggcgtaattacaaaaacaaaggctaattatttcccgagagataaagtgagggattttacgggcaccccgacccagacctaacttcttttgctttcgctgaattttgaggtgggggtcttactgcacggcaaatagcgggataaatatgtgtaacagagactagtgaatggaaacgaaaagagagcaaagttacagctttacgcgctgaactctgctctctttttgcgtggcatcttctctcgttgaaattataatagcgatcccgagcataataaaaaaagctaaaaagaggacgaactttgggaagaacgggaatagtaatagcgctccgactatcataattgttaataatacgtagtgcaggacgtattggaataggttgtccatattttcgccccctttttggtaattggttattagtattctatgtttcatgctgaaggaatagaagtagatttttaagttttaatacgaattatagctgagttttcttaaagtataaatgtagagtgaaaattttggaaaaattctcaaaatatttatttagaaagaattgacaaaacataatgaacgatataagctaataaccataaagtctaccggaaaagtcggaataagattgttacccctcaaaaacatctatttttttctgattaaaaccgacttttccgattggctataaatgtgctgtgggaggcatacataagctaataagttcaagggtataactattaaacagttagggtggggacaatgaagaaaaagacaaaaaaatgggctggtgtattttcagtattactgagtagttcgcttgtgttatctgcttgtgggggacaggaggatacggcttctacagagccggttaagcagcaggatttaaaaaatgtgaaaattgaaaagattgccgcgacagataaaacgaaagtgccagacaaagcgaagaatagaaaagatacgttagtagttggtattagtaagccaggcggcgtatttttaccatactttcaacaaaatggttgggatggaaacgtaacttcagttatttttgcatctctcgtatcaaccgataaacaagggaaaccaattccagaattagctgagaagtgggacgtttcttctgatcagttaacatatacattccatttacgtaaaaatttgaaatttagtgatggatcgccattaacggcggatgatgtagctttcacattgacgcttttacatgataaggcatatgaaggtgaagtagatatctctcaatatgccgttaaaggtggtaaagaatataaagaaggaaaagcaacttcaattgaaggtattcaagttgttgatccacaaacaattaaaattacaactgaaaaagtgaattcacaagctatatttgttttaggaggtacagtactatcaaaagcttattatggaaaagattataagcaaaatacaagcttagattacttaaaagatttatatggaaagccattagctgcgggtccatataaatttgaaaagtatattccaggtcaagaagttcgttttgttgctaacgaaaattattatgcgggtaaaccaaaaattcaaaactttatttataaaattacttctggtgatacgaagcttcagttattccaaacaggagaagttgaccatactggcttaggtaccggtgatgaggttcttgaacaggctaaggctttagaattcgcaaatatccaaatcgaaacagcgccgtcatttagttatatttatatgaataataataagccttacttaaaggataaaaaggttcgccaagcacttatttacggattagaccgcaaaaaatatgttgatacagcgttaaaaggatacggtacagtagccaatgtaccaattcatccaacttcttgggcttatacggaagaaggagttaataaatacgaatacgataaagaaaaagcgaaaaaattattagatgaagcagggtggaaagttggttcggatggaattcgtgaaaaagatggtcaaaaattaaaactttcttatttcggtccaagttcggctaaagatagtgatttattaattccgattgcgaaagagaattataaagaaataggtgtagagtttaatcctgaatttatggactttaatacgatgctttctaaggtaaacaaaggagattatgatttagcttctgtttcgacaccgattacaagtgacccgagtgaaacagctggtgaatatttgtctactgcaaatgaaactagtcttggttataagaatgcaaaagtagatgagctaattcaaaaaggtattgaaactgtagatatcgaaaagcgtaaacctatttataaagaattgtataaagaattaagtgatgatccaccagtaattctattaaactaccgtagaacaattactggttataacgggaatataaaaggaattgatcctgaaaagtacaacagtattagtgcaaacttaccagtattatcatttgaaaaataacgataagaatgtataagtagaagacattttttcattcggttagtaatgtgccgctttgaaaaaatgttcttctattttaagcataagattggagagaaaaagggtgaaaacatatattgttcgtaggttgttacaaatgattcctacactgcttggtacatcaattattatcttcgtcctgttcgcacttcttcctggggattatattgattcaaacccgaaaattacaccggaaagagcagctgaactgagggaattatatgggttgaacaaaccaattgttgagcgttattttcattggttaggtaatgcattgcaaggggactttggcttctcgcttcaatatcaagagcctgtaacgtcattattaaataaatttatttggaattcttttagtgtagcaattattgcattgttttttatttggctaattgcacttattatcggtgtattctcggcgacgaagcaacattctttattcgataaacttgtaacaatcggtgtttttgcagcaatgtcatttccttcattctttatcggcttgtttttaattaaggtgtttgcggttgactttaagttattaccgataggtggaatgattgatgttggcagtaattcaacaggatttgcttacgtgatagaagttgcaaaacatatgattttaccagtatttattttaacacttcttggggtcggctcgcatgcccatcaacttaagaatttgcactacccccaagtgtcaaaaaacgttattcttcacgatccgttgtcgcatactctaaaatacaccccatcggacaagcaaatgcattcatttcttctacatatttaaattggctttttgaccctttacgctccttgaggaaggagtcttcttggctaaaatgataaatttgaagctataaaagtaacagaattatgtaataagtgaatcaaaaaaacaaccccaaaagcagacatggtaacctgatatttttcattcttttttttatatacccaataagcatagttatataaaagaccaattatcgttgtaccaactatataagtgattccatatggatgatttaatccaaatataattgaagctattaatatgataaggtaatcgtgatttttaatgtaaggaatccaacttaatagccaaaataaaaatacttgaaaaactattgtttcatatataggtgccgctaatacccctaataaaacttgaagaataagaggtgcttctgttattgggtttttttgtatttcaggtaagaatagatctaatggtattacaaataaaaatgatcctaataaaataagaaaaataaaagaaatggtaggcaaagcaaacataaatctatttatttttttgagcatatatatttctcctataatcttttattacatctatacgaaaagtaataaataattgagtctctttttgtttgacatgtttttgtctactattgatgaaaaccgttctgtaattgaattcttggcttatatgtaggtgtagcgataaagtagggatatattaacactatattgttaatattaaaatattaaagagctaagtgagatattaagttcacaccaattttatgatgaatataatatcaagccagttaaggaaatatgctgtataggacacgcttgtactgtttattttactatatgaatatttaagtgcatatagttttggaggagtatgtatttttgcattttttaatacaaaagttttttgttaaaaatttactttctgcgctacctcatatgaatttaagacacttgaagagtaaaggccaaaagagtctaagtttagattgtacaggtaaatattataatattatagaaaaataaggggaaaagttataaaataggagattgaattaaactttcagattttattgttctgcaagataaaaataactaaagatgaggctcttaaaaattcttatctttatttaaaactaacgatattataaaaaatccttgctgaaggtactgcaacaaatctaatttgaaaatctttaggagataaatatggaattttaaatattcttagtcgtctataaaacattatagcaattattataggcaaatcctttaatatcatcgatttagaagaaatcagtacaaatagaaaagatgaagtggtagaagtattacgtcttccttttaatagatttccaagagcagctggacatataaaagatgcaattgtaaatgaaaaaaattggaacatttagttgaacgattagtatgccattttaaagtttaaattaataacagaaagagcacctcttaatatgttactactttgtttttgtattgttgaaaataagaaaggagaaatcaatgaaaaaatattggcataagctatcgttacttcaaaaaaatgtattactaacggtattagtaattctgacccttgttggaagtatgggagcgttaagttttaatatgtttcaaaatagtatgatgtctatatttgagaggcagtcttttgaaacaggtgatgcggtattaaatcaattagatctagaaatagtaagagatgtagcaaaagaccccacagctcaaagagtgaagaaagaaaaattgacagagcaattaaataaatctataaaagatatgaaaagtgttggacaaacatatgttacaggagccaagctaaatgaaaaagctgaattacaaatagtagctttggatacagaattagcaaatactgtttctgtaaaaccaggtgaatactatgagcagcctacttattggatgaaaacatatgataaagtaatacaaacaaaacaggcacaaatgacagaagtgtatgaagatgaattagggttctgggtaacaattttagagccagttacagatgaaaataaaaatataattgcaattgttgcagcggatttggaagcttctattattccacttacaaagaaaaactttatgatacaaggtttactatttattataatttcattaactatcgcaattacaattcaaatatttatctcacgaaactctctatcgcctttaaaggatttacaagaagggttacgtaaagttggtgaaggggatttaagtattaaattgaatgaaagatctgatgatatagggataactaatatctattttaataacactattaaaaagtttaataagattatagataaagtaagggagactgctgaacaagtttcgacatcttcacaggaattgtcggtaagtacaaaagagaatagcatagcctttaaagaaattgcaagtgctattacaggattaaatttaggagcacattctcatgaatatgtagtgcaaaaatgtttagggattgttcaagaaatggaaagtaagatgaaagaaattaaaggagctgcaaaacaagttggcaatgctttggaagacatggaacagcattctgtagagggaaaagatttgattaagcaaatcgtgaatcaaatgaaaagaatccaagatacagttcaggatgtatcttctagtatttatgcattcgaagcacgatctaaggaaattcatgaaattcttactgtaattacaaccatttcaaatcaaacaaattcattagctttaaatgcttctactgaatcctcatgtgctggagagatgggggaagaattttcaggtgttgcggacgaggtacatatattagcggaaagaaccgaggcatctgcaagggatatagctaaattaattggtgaaacccaggctgaagcagagagagctgtaagatccatacagaagagttcaaaggaagtagaagtaggaataacacttgttcaaagtagtggtgctttttttgaaaagatttcagaatctgcacaatctgttacaaatcaaattaaagcgacttcgaatcattcaagtgaaattctaacagataatcaaactattgttcagtttataaatgaattatcacacattgcgaatacatatgtgaatagtagtagtaatgtggagacaagtatgaaagagcaagaactatatgtacaagatattgcagagttagcaaattctctaaattggctctcgcaagagttacaggggttaataggggaatttaaaagtaagtaggatagaagaaggtaaaggtatagggtatgacctatacctttatttattcccacataagggatgaaagcttaggtatatatgtaaaatagctaaacgaataatttttttgcatattttgttggaaatagagcatgatattaccaaattcaacggaggtgtttaaaaaatgcaaattcgcgaaaataataattcaaacgaaatcttaatagcagctgcagcaagtgcaattgagcaaatgaaatatgaaattgctcaggagtttggtgttacacttggaccagattcaacagcacgagcgaatggttcagtaggtggagagattacgaaacgtttagttcgtatggcgcaagagcagttatctggtcaatataaaattcactaaaactaaaggtatatcccattgaagggatatacctttttaatttgtttttaaagaggatcgttacattttttattattggttaagtttagaaacagcaaatttagctgtaaaattcatcttcttcatgtacgtagaatttacacctgcttgaaattgtacagaaatattaccgtctttttgcgctttaaatacgcgaccatatggggaattagcattgaatgtgccaattacttgattatccgcatcaaagaccgtataagaaattgggaaccctgaattttgtacaaagactgtaagttcttccccttttttaagattaaatgattctttttgagacacttcataggaactcatagagtagtattttgtgacttcttgaatttctaaattcgtagtagctgcactcgcttttgatgcctcagcccctggtaagtttatacctgaaaatactgcaattcctagtgcccctgctaaaatcaattttttcataatagtatttcctcctttaatatattgtgagatttgaaacgaaagtgaaaatttcaatccctgaaaccattatagttacaatgagaattattttcaataagggttagtatgtaattttgcatatataaagtattaacataaggtaatcagtcaagttttgaagtattcttaacagaagggaaggaaaaaattaaaaaatcatgaatgatattgtaaccgaactatatatcttttgagaatattccgtctgcatcaagtgaatatattattaattttatttgtatttgttttttatcataaaacattttaaggttgataaagtttcattgagtgggattattaaacaaaaattacaaattatatgttatgataaaaaggcaataaagtacatcatcctgactttattgtatgtgtttagcctatgtatgtcgtttgtattaaaaataagaagtctcttaaaaagagacttcttattttttgtatggagggggtattacagatgattgattactatcaaatgtttttaattactatggcaggtattgccttattttttttatatacaacatgctggaaaaccaacgaaaagaaacaaatggaagtttttaattgtagtattttattttaccttttgaattatttatttcttaaatttttatagatagatgtagaggagatacgtttatcattctaaaaaataatgaaaggaaggtgtaatccttcctttcattatccagtatgtccgtgcgaatatttaataatatttacagtactttgagtgcctgttgaaggacttgatccaaaagttactgtaacgacaattaaaataccaagtaagctaaccgctaattttttcattttaatgctccttttttaaagtttttttcattggctttactagcttcataaaagtaatagctagcttttagatgattatcttctttgtaaaattggactgctaacttttcggtatattcatttatatactcatatagttcttctcgttcaaaataagaaattccttctaaaacagctttttctaaatcattagcacaactatgaagatttattttttctaaaatattaaagtgatgaatatagccttcggttcccaattgagtagagagttggaggcccttttttattaattcttgagcaatttcatgttctcctaatttataatgttctctagcttcaatgaatacggctttataatcgctaggtagtttttgattaacttcagataaatatcttaatgctacttcagatagattctgtgtagcgtacataaatcctagattgtgacggacaattaaaatattgtattctaaattttctttttggaatgtatccatagcagagataaagtgttcctcagctaactcccattcctttaaatgagtgcatgctaatccatataagttattacaaaaggcaacttttaattcatatccagaatgctttgaaaaaatatcttttgccttcattacatgattaatacataaaattgatctatgtgtatgacagtagaaaatggctaactcataatggaattcagcatgttcaatctcatcaggtatggtttctaacaagtattcggctttatcgtaatggatttttgcaaggctatgattgccagtaacattggaatgaatggctttaaagaagtgataatagtatgaaaggaaatcgtctgtaggagttttgtaagcatcactttgtttaaagctatctttagaaatacttaagctatcaattaaatattgatgcctaaaatctagtagtgagtagtataataatatcgtttgattttcttctatattatggattttgttttcaatttcttgtttaagtaattgagcggcgtctacatgcctagccctaatttcttgataccattcatttaataaatgagttatttgctcgttcccctgtatatgaacattcattgttcaatttcatcctctccaaagatattatgcagcaattagtatcatatcagaaatttcctctatcaaaatctatttaatagcatttatcaatataagacggaatattctatcaatttatatttgttgagattcaagtagtatgtattattgtaatttgtataacaataacctcttttttcaatttaaagatttgatcaaaatatatttttttaacaggaggaaagggagctatacctaagtaattatgtatagggataataggagaatagaaataaataataacggggaatttgaaatgttagagttaaaagaaaagcaagagagaaaagagattttggaagaagataagatgtttaatatcttgtattatgtgaatacagatgagttaaatattatttctgattttaaagaattaaaagagggttgtattcgtatagcaacaaacttatatggtaaaaattcatctgctttacaagctgtcctacaagcttgtaaagcagcttatatttaatctcttaatagggtgtagcttattattcgctattaataaatggataataatattttgacattagaaaagggaacgcttatagagtgtttccttttctaatgtaattgactttattttttagatctcacataaccagctgcttgagcatcagcttctgaacagaaccaaacaatattgtcttttgtagaatcataatattgtccaccaggaacatggtattttttcgaattggcatttcctttaatttgtcctttacaagtggtattggcttctttgtcatcactaggatcattttggaaaggtttccgattagaaccgttatgattaccactagatgaggaaacaacagcattacttttttgtgaagcttcttcctgggccttacggttagcttcttcctgagctttacggttagcttcttcctgagctttacggttagcttcttcctgagctttacgttgagcttcttcttgagctttatggttagcttcttcctgagctttacgttgagtctcttcttgagctttacggttagcttcttcctgagccttacggtcagcttcttcttgagctttacgttcagtttcttcctgagctttacgttgagcttcttccttactctttgtgtctgctgtatcttttttagtatcttgtgaagtggcaactttggtgtctgccttttgtacagtttgattggaagttgattttccatcaataaatacaatacccattaaaaagaaagctagtgctagatataaatatgaatatactactttctttctggttttaatttgtattttgggtaacacaaattgtggtttaattaatccaataattaaagcaagtaagcttaacggaaatcccaaaaaaccaatattaacaagggcagggcggatagaatttggaataattgcttgaagtattaaaaataaaataaagatataaacaatggaagcaataaacattttccatgcggttttagagcgataaccaaaaatttttctccagttcatttaagaacctccttatctaagatactagattttgctcataaattataatactgtaatgatttaatattgagatgcaattcatcacctctcatttaataaaattaatgtatttatgtaacaaatatacatatctaagcatatcattgtcgttaacaaattttccatttttttattttcattttgtcttgtttactcgaaaaattttagtatattagagattttagatgctttattttggctccttcattagcaaatgaaaggttaatcatcatttaaaaggaaaacttggtgttaaaatatgaattaatataagatagtaagtattaattaatctgtataaggaagtgtgtaggtatgaagagaaaagtatcagtggttggtgcggtaattgttaatgaaaataatgaagtcttatgtgcattacgttccccgacaatgacgttacctgattattgggagtttccaggtggtaagataaacaaaggagaagaaccatcagctgcattaattcgtgaaattaaagaagagcttggatgtacaattgttgtagatgagaaggtagaggaagttgagtgcgagtatgaaaccattgttgttcatcttactacatataaagctagaatcttggcaggtaagcctaaagctcttgaacatgcagagctaaaatggatgagtattaaggatttaaagcatttaaagtgggcacccgctgatgttcctacggtagaagcactgtaggaatattttaatcaaatacccttgagaattataattttattatgtaatatataattatattgttagtttatttgatttcgtttattcccacacctaccttccttatgtgttgtggttgagttgtagaagcaagttttttcttgtttcaattttgagagggcttctttgagccgattagtgtatatagcttattttgctatgcacgattaatcgacttaaaggagcctttttttgtttttttaagtggaggtttaaagtaggttttaagctaaagagaaatatgattgtttagaaggaatatatagtgatgaactgaagcctatagcacctaactaaaagagttatatgaaattatagtaagttaaatctcctatagagatttcaaaataccgaagtaataagcgcagttaaaggggaaggtcccaaattcttaaatggacacaataatgcatctatagaagaggagaattaaaattgaaaccaactagagaaaagtacgtaattaatggggagtacacaatagaacgtaagcttttacataatgaaatcattaaattatttctaaatgatcaaccgcagcaagagcaagaacctgaggctatattacttggtggtggttctgctgctggaaaaagctcaattggagagttagtaagtaagggatataaacatcagaaacaaaacatggtttggatagatcctgataagatcaaagaaaaaataccagaatatcaagagttaatagaatccggaaacattgagttaataaaacaagcagcttttttagttcatgatgaaagtagtgatattaccatgaaacttttaaaaatctgcatgaaaagaaaaataaactgtatgtatgatggtacaatgaaaaatgaagtaaaatacaaaaagttaattcaacaattaagactagcaggttttagtattaaagcaattattgtagatgttccaatcaaggttgccttagagcgatccaatttgcgttttaaagtaacaggaagattggtaccccaaagtataattgaagaaagccatatgaaagtagcgactactttttctaaaattaaagatttaatagattgctatactttatatgataatacagggaaggaaccagaagtttttgcttttaaagaatcaaaacgagtaaaagaaattattgttgatgaatgtagaaataatcaatttatcgagaaatcagctcttgttttcaagtgaatatatatcgtttaagttttataagataattaatagatattatcctgacattttattatattattgatataataaatacaggaggcgatataaatggaacttaaagaccttatgaattatattgaagaaaacaaagaagaacattttcatgatttaatcgctaaaaatgaacgggaaattgtaaaaaaagaagaagaagagaaataaaaaatttaaaatagaagagttggccttttgggtcaactcttttgtttttataaatggatataaagttggatttctcaattgttgagtaaaaggaattgcagaatttttctgtagagaaggttgtttggtattgaaaatgaaacagacaatttgctaatcataggagagttttttagtattatattaaatagaaaatagcgtaatgagttaacgctttaggagagagtatatgaatcattttattgttatgcaggggcatacatatcaagaggaaaaaggattagaaattatttggtcacctaaaaaggatagaggcggtaatgtaccacattcatggaaaagaatgatggatgtaaaagagggggatcgaatctttcattatgtaaaagggaatattgtagcagttagtatagctgaagaagattgtaaggaatcgaataaaccatcgattatgaaaagccatgatcaatggaatgatgaaggctatttggtatctttaaaatatcatgagttagaaaaaccaattaatatacgtgagaaatttgaagagatatcgcacctgttgccaattaaatattcaccttttcaatcagatgcaaatggaaaccaaggttatttatatccatgtaatgaagaattagcccttaaattaatggaactaattggtgattcaaacatttataaaatcaatgatgagcaattagagttggcagttgatccggtaagaaggacagaaaacaatacattaattccggttatagctgagacggaatccgaagtaaaagcgaaaatccgaattggacagcaaaaatttagagaggaattaatggagatttggaacggaaaatgtgcattatgcggaataaatttaccagaattgttaagagcaagtcattctaagccatggaaagatagtacaagtatggaacgcttagatccgtataacggtgtactactgtgctgtaatcatgatgctctttatgataaaggttttatcacatttgatggccagggacgactgcatatttcctcattaatagtggaaacagattatttgaaatttggattaataccaaaagctaagataggaattcaaccggagaataaattatactttaagtggcataagaggaatatttttaaaggaaaatagtataatttttaacttcaaggacaggaagaacataagagagacgaattgggttatccagtaaaggggaatggtacatgtataactgtaatcaatgtgggacagaaatgattatgcaattacaagatagatatagagaatagtgtcccaaatgtgaagggcttaaaccaaataacttggtatactataatctatatgaattactagattatatggaagcgaatcgctacatgagtaaggaaaatatgctacataattttttgaagtgggagtttgatttaacaaaagggaatatatttaagttatatttaggcgtagatcaatatgatcaattcaatgatgaggatttcacaagacgattagaggactatatgaaggggattcgattaaaattaaatgttaaatatgaagatgattatatctggattaaggttaattagatggaattccagatgtaatgaattttgttttaaagagatagtaagtaattgagaggggattaatggtgatggaagatttgcaaaatgcagtaataaaatttcgagatgagagaaattgggggcagtttcataatgcgaaggatctagcaatctcgttaaatttagaagcatcagagttgcttgaggcttttcaatggaagtctagtgaagaagcaacagagacgaaaatgcaggacataaaagaagaaatggcggatgtaatgatttatttacttatgctaagtgataaattaaatattgatctagaagaagtagtacatgcaaagttggaaaagaatgcagagaaatatcctgtagaaaaagcatttggaagcaataaaaaatataacgaactgtaaaactataatcgttttacagttttttgaaatgcttatgagaaagcagatggttgagatcatgatttgatgtatggattgtattttaaaagtatgaaatccatacatccttaagtattattaaaattaaaaagtagggagttattcaaatgctatcatttgcagcaaaattatcttcattttacataattaaaaagaagcgaaaagagtttgagcaaggttatattagagaccctaaaatagatggaataccagtagtttatattcaacgagataaaaagaatttatatgtaggtaaatccacagatatttatggccgtttcattgcacatttaaatgatgaagataaaacattcaaggaagttattgtgataaagagtgatttatttaatgaaagctcaattaaacatattgaaacattattaattgaatatttattagcggatgaaaaatttaacttactaaataaagtcagaggacaaaaaattcattcctataatggaattgaaaatgttgaaaatatgtttggagaaatttgggctcagttaatgaaagaaggtatagctagtgagaatttaggtgagatacataataaatttatttataaatattcaccatttaaagagttatcggctaatcaaattgaggtttgtaaagacatttttaatacaatgcttactacatcaaatagtcgacatttgattacaggggacccgggtactggtaaaacaattgtattaacaaacatcttatatgcgcttgcttatgacagtgaaactggtaaagtgagagagggattgaattataaggatatagcacttgttgttccacaaaatcactcattaaatttatataagagcttgatgaacaaactaggtctacaaagtattacagtactgtcaccttcacaatttattaagcaggcaaaaagtagggacacaaaatataaatatgtttttgtggacgaagcacatcgtctaaaacaatattttggtaaacaagcacgtgatttaaaacatttagtcaccgataatggttatacaactgagttggaattaatagaaacatttgcgtatcacttaactgtggtttatgatccataccaaacaattcgaccagcagatataaatacagatgtattccagcagttgacagcaaattataagaggcatcccttacataaacaattccgtttaaaatctggagatcaatatttagcatggcttcgtaaatatttacaaatagcaaataatgttggagtgtatgaagaagggttattgcggggctatgattttaaggtaatagactctattacagaattgaatcaatctatgaaaatgttaaatgaaaaacatgaattatgtcgtgtagtcgcgggttattcttggaaatggattacacagaaggacaaaaatcattatgatataaaagatcctgttacaggtgagacattcaaatggaactcaaaggtaaaaggttggattaactttgagaatagtatagaggaaataggatgtatacatactacacaaggtgcggatttaaattatgttggtgtgattttaggagctgaaattgattgtgattacgcaggtgaagaaaatggagactatgatttaaataaggctaagattgtagtgaatccaaaagaatataaagatcgaaacggtcttccaattaagggaacagatataaataatgaggagttaacatcctatattaaacgtatttattatgtattattatctcgcggaataaatggatgttatgtctatgcagtaaatcaaaatatgcaaagatatttaaaggagatagcaaaagtaagtcaataattatgaaaaggggttacctttaatgtggtagtccctgccaattagatagcattttataagtatttaaagagccttactacacataaattgtagtaaggctcttattatctctatagaaataaggattagaaaataacttatcccctcggaagaaaaaagactttattttaacttccctattgataggttaacacgataattcccatattttaatagtcgacctagaaagttatccaattcttcattagaagaaaaatgtgtttttaataaataacatccttcaccacttacacgatgtacttcagatatttcttcttctttttgaaagaaatccataaattcttgatgattagctgatgtgacaaacaaagtaacaaatgcagtcacggtttgtcctagtttgattcggtttatagcgattgtatattgttcaataatccctaaatcctctaatctcctaattcgatttcctacagcctgcccagtcatatgtattttttgacctagttctttccattgtattcttgagttttctcctaataatttcagtatctcaaaatctgtttgatcaataatataaaccaatcctttcatcgtgaaagtagaaaagcagaaagtgtttcgccaacttattcagcttatcgatacaattcactatactaagtttatcctcttacatcgcattgtttattagttatatttacttataacacagaggacgcaacaaaaaaatacatctagatttaaaggaggttacaaatatgttattacaagatattttatcattcaatgaaaaatttgtagaaaataagaaatacgccccccgtgaagcaacaaaaatgcctaagaaacgtatggttgttgtttcttgcatggatgctcgtttaattgagctacttccaaaagctttagatatacacgatggagatgcaaaagttatcagaaatgcaggtggtaagattgcttctcctttcgatagtgttatgcaaagtgttgtagcatcagtatatgatctaaatgcagatgaaatctttcttatcggacaccatagatgtggtgcaagccaaactaatcccaaaggaacacttcaaaaaatattagatcgtggagtagcttcaccagaaattttagcagcaattgaatatgctggtgttgaccttgaaaaatggctatttggattcgatgatatctgtgattcgactcaagctaatgttgatttagtaagaaatcatccacttattccaaaagatgttcctgtacatggtttagttattgatcctcacacaggtaaattagatgtagtagttgatggatataaaacattaaatggtatgaaacattaatcattacttaaatgaagggaagttattaaatatgaatagacaagaagctacgcaaaaaattatggaagcaaaaatcgcaaaaggtttaacatgggaagaaatttcaaaagtaagtgaaaactctgagacttgggttgtaacagcattattagggcaggctacaatgacacgtccggaggcagaaaaaatcggtaaactattagaattagatgaagaagtagttcaggcattaacagtagttccacttagaggtcaagtaatgcaaatgcctcctactgacccaatcttatatcgattatatgaaatgatgttacaatacgcaccaactcttagagaattaatcttagaaaaagctggtgaaggtgtaatgagtgcaattaacttcaatttaggtgtggatacacaagaagatccaaaaggtggcgatcctcgtatcgttattacacttaatgggaaattcttaccatttcgtgcatggtaattaattaaaaatctatctatacaattaaattgattttacagatttacaaaatccatcctttttaatctaactgtgtagaaaggatggatttttactatgagattctttttcagtaaaggagaataatatgaataaaaaatactttaatacaagctttagtattctacagtggtttgtgtttctattagcaaatgcaattgcattgcctatcattattggtggcatattccatttatcagtagaagatatttcaacattaatgcagcgaacttttttagtcgtgggaataagttcatttatacaagcatggtttgggcatcgctatcccatagcggatggtccagccggttcatgggtaagtatatttgtcatactgggacaagttgctatgcatcagggacaaagtgcaaaagacgtgttgcaacttttagaaggtgggttaattattgcaggtatattactcttcgttcttggtataacagggcttgttcatcaaatcttacgtttatttactcctttagttacagggacatttcttttaattttagcacttcaacttagtggtgtgttactaaaaggaatgatgggattacaaggatctgcaactcatcctgattatccaacagctattattgcgctctttgtttttgcctttattactttcttatcaattaaagggacaggatggatgaaaaggtacgctgtgttacttggaatttcatgtggttggcttttgtatactcttttaggagaatcatcttatatgcctacacatacaacgctagttaagttaccagagatatttgcttggggcacacctagattggatattggaatgaccctaactgcaactttatttacatttcttttagttgcaaatacaattgctgctatttcagctgtaaaacaagtagctcccttatctaaagaaaatgaaaagcaaacattgaaccgtggtgtatgggtcggaggtatatcacatattatctcgtcgttgttttctacaattggtattgtaccattacctgcaacagcaggatttattcaattaacaggacaaagaaagttgaagtcgttccttatagcaagtcttatattagcaggaatttcttttgttccctcaatcgtaagctttatatccttgcttccaggccctattgccaatgctgcacttttagcaacatttgtccaagtaataggcatttcatttcaatcaattttaagcgaagaattaaatcaacgccgattaacaatattaggaattacattattaatcagtttaggaataatgtttcttccagaaagcgcatttagtggcattccttcttccttacaatatgttttaaggaatggattgctcgtgggtaccgtgattgtcattctattggaacagttttggaaagaataaagtatttatatgcttttttatttggaagaaaataaagaatgaaaatcagcatttggaaatattttaaaatatcttgatataaacctatgtattttgtaatatataggtatattgttagtttatttgattccgttcattcccacaccttatgtgttgtggttgagttgtagaagtaagtttttttcttactttaattttgaaagggcttctttgagccgattagtgtaattagcttattttgctatgcacaattaatcgacttgaggaggccttttttgtttgggtttaaacaggtataaatatatatttctgtataaaacaacagattaagataggaaatttatatagggggagaaaacatatgagtaattgatttgtttatcagggaaattggagggatatgtagtttttttacgttaaatgtatacacggatatatgaaactgtggttgtaaaatagatacataatagatttacgaatcgcagcaaaaataattatatagaagttttgtagacgacataaatgtactcattataagaaggatgaatagaattttactgtgaatttttaaaaaacgcatcaattgatacgtttttttattgtaattctagtaaatatgaggtacgatttgaaaggggaaagaattttaatgcatattagctttcaaaatagggagacaaaaaagcacactaattttacaatcggggagattgagcagtacatattagagtttaaagaattaattaaaaataatcgatttacggtttctcgaaatgaaaaaaggaaagagaatagtgaatttttagaggctaataagattaacgctagtaaagtgaaagagattcttcttaatataggagtacgtgatttttgttatgcagttgataataaaaatccaaattttgctcatgaaaaattgtatatcttttgtccacaatatgagttagataattggggacaaaagaagtcggtagacatatatattaagatgaatctaattgaaaataagaacaggaacaaatacatgattgttgtttcttttcataaaaggaataaaccagtcacttatctttttaggtaaagataagtgactaatggttttagaatgagggaggatttttatgttggttttatgtgagttttgtcgagatatggtaaagtattctactaaagatgtttcaaaagtgacagtcattagagggaagcaatatcattatgtaggtaaagaagcaaattgcgaggagtgtaaatctgaaatatttgttcctaacattcatgattataatttagaacaattagatcatgcctatagacaacaggaacagttagttactatttctgaaataagagaggttttagaaaaatataagattggaaaacgtccattgtctttacttttaggttggggagaggttaccctaacaaggtatgtaaatggagatattccgacgaagcagtactcggatatattgaaaagattaggtagagatcaatcttttatgctagatattttggaaagaaataaagatttaattactcaaaaagcatatagagtctctaaagaagcaatcgcgaagctacaggaaaatgatgatattccttctacgcagactacgaaaatcgaggaagttgctaactatttgctatataaaaatgatgatattactcctttagctcttcaaaagctgttatactatgcgcaaggattttgtaaggtgcttactgggacatatttatttgaagatgattgtgaagtaggaagtcatggcccggtatatcgagctatttttaataaatataaagtatatcagtacgacaatcttgaagttaattatgatagtacaaatcaattaactcaaatagaaaaggaaatattagactgtgtaatcaatactttaggttgttatagtgggaagagtttagaaaaaatgattctatttgacttaccatgggaagttgcgcatctagaattagaagataatgatcccggtaaacctattatggaaaaagaagagatagataattgctttaatacaatgaaacaggcatataatttagttacaatttctgatataaagaaatatggcataaaagcatttgaaaatataaacaattcaatgttgtaactatatcatttttaatatgattgatatatgaattttttactgttaatcaggcctctataaaggtattaaaagatagtactaattacaaaaggttaggattgcagaatataaacattattaacacgatgtaaatatgcatattaaataaaaagtaaagtggattgatacattatatggtaaaatgatatatatgaaaacgtcttatgaagtaaattttacgctttggacctttagctcagctggttagagcaaacggctcataaccgttcggtcgtaggttcgagtcctacaaggtccacttataaacaaggagaaagcactcaaatgagtgctttctccttgtttataataaataaaggggattgtgacatgaaaataattgatttagagacagaaagaaaaaagaagggaaaattaatggtaactattccaattatagaactaatatatggagaaaaaggggaaattgaatttaaagtagtgggaaaaaaagttgttccgcaatccatgttagagaattaaactactttcaatttctataggctgtaaggtcgttaagtgggagatttctaagtacggaaacctcgtggattttgattgattatgctatccctgtagttcctaaggctaagagatgagttttctccgttagtatgggagaaaaaggagaaaggaaaggacatagctattgcggttttagatacgggttgcaatattaatataaagacgttattctttcctatgatttttcagaaagaataacgcctttttcattttagagggtattttgtcttgttagcttgatagcgatagggtagcgccatcaaaacgcaaatttcgtacgctaagagaatttggaaagagctaaggttctgattcccttaaaggacaaaacgaaggagaattcctaacaataaagttgtatttacctaggaaaattaatatgctctgaactaagaggtaagatatttgccaaccttcttcatattttttgtagctggagttaaatacaaaatattacagaagtagagacaacattgataattagatttagcccactggtgcgttgtaactagtctaatagtaatctttctcgaagctcactgtattatcgaaaagaattgcgcatgctaatgcattcattgcttattctttagtttattgaatataatgatcctatttctaaaatagaaggatgataggatcaattacttgtcactttaaatttaattaaaaaacaattgtactaacagcatgtagataattgttccacctgctatggagagaagcatttgtctcttccatatgtgaaggattattactactcctactgaaattaattctggagcaccatgattgccggataataagttcagatccttaaaacagtaaataactaaaagacttatgacagctgaaggtagtaccttaccgagatactggacatattgcggagtaggtttatctgatgggaacactaagaagggaaggaaccttgtaatcattgtgcctaaaaccactataccaactgttataacttgttgcagtaaactcattgtcacacggaaacctcctctatgttctctattggtttttttaggatagtaagtactaataaaatcataatcattgcaggaattatgaaattgtttccaccaaaaataattaggctaaatatcgataatcccagtcctacaagagcgctataatgctttttctccctcatccattgttcaacaaaaatcacaacgaaaagtgctgtcataacgaaatctagtccttttgtattgaagtgtacaagggaaccaaaaataccaccaattgcggctcctataccccaatacaaatgattaagcagtgtcacgaagaacataaaccaacccttatcaacaccttttggaatatcaacagtagaattaatagaaaaagattcatcacatagtccaaaaataagataaaactttttcttaccagttcctttatacttatctagcatagaaataccataaaataaatgccgtgcattcaccattaaagtaagaaaaagtgcatgaattggattaaaagcaaccagtaataaattagctgcaataaattccattgatcctgcgaatatgattaaactcattagaattggatatattgcactgaaacccagagagttcatgtagattccataagcaattcctaaaaatacaaaaccagcaaaaataggtattgtataaggaaaagctgcacggaatgcgattcttatttgatttctatttttcatattattcacatccttaatcaagagctttattgcatacaaatttaacacataaaatccatacaatgaataagaaaattgtatgtattacaattttctttagcggaagtgtgttattctaactttaaaataatgctgagtttttatccttgtaatacttttcaaagtttataaatcttaattttaactattaaaatttaccctataaaaatttaatcgtagaggtgaagcatgccagtaaattcatttgaaaattactctatgtcttggaaacctaataaggaactattaaagcgtccgttttattcctctattgcagcactacttgaacatgatattgtaaatggttttttagctccaggaacaaaattgcctccacaacgagaattagcagattttttagatttaaactttacaacaattacccgagcttacaaactatgtgaagttaaaggcctaatttatgcaatcacagggagtggaacttttgtagctcctaatgcaactcgttccattactatttctacagaggaaatcagaaactgtattgatcttggattagtagcatcatttgagcaaactaatagtattgtcgcagagactattcaaaaggtcgtagataaacagtatttagagcaactattaaattacaatgatccaactggtcttccgcaccaaaaaacggcaggtctcaattggatgaagtctttcggcattaatgtggatcaggaccatatagcaatagtttcgggggcacaaaatgctttagcaattacattgacagcgttgtttaaacctggaaaccgaattgcaactgatgtatacacctattcaaattttatcgaattggcaaaaatgctacatattcaattagtacccattcaaggggatgaatttggaatgctcccaagtgaactcgataagcaatgtagtcaattagatattcatggtatttttttaatgccttcttgctctaatcctactacgattatgatttcagattttcgaaaaaaagagttagcagcaatcattcgaaagcatcaaataattttgattgaggatgatattcatgcatttttgacagcaggggttatttctgattatgagcaaccaatgtttaatttacttccagaacaaagtgtttatattagtggaacttctaagtgcatttgttcaggattaagggttgcttatatggtattcggagatgccttacgtaaggatattttaaaggctatatttaatgtcaatgttaaaacatcttctttagacgtagaggtgataacagagctagtgttatcaggaaaagctcatgaaattgttaagcagaagaaatttttagcagagtctgcaaacgaaatttattcaggatatttttcttccaacaagcctgtagggcatccttttagtttttaccgttggctacctattcaaaatcattatgatgcatttcaattagaaacagatttggagaggcacggcattcgggtttttcattccgagcgctttattacagcacaaaccatgcctaatcagtatttacgagtcgctctatcctctacaaactcattagaagagttgaaaatagggctagaaatactaaaacaatatctcggctagtgtgaactacccgccacttaacgtcctaacggactgtttgaagtgggggcttctcggttagtcgttacttttggtagctcccttggatttataggtacatcccgtccctaaaaacctaacttaatcatacgagggagatgttcaataatggaaattagaaaaaaattagttgacccaagtaaatatggtacaaagtgtccgtatacaatgaatccagaattcattacagtccacaatacgtacaacgatgctacagcagaaaacgaagtagcttatatgattcgtaatgacaaccaagtatcgtttcatatcgcggtagatgataaggaagctgtacaaggaattcctttagagcgtaacgcctggcatactggcgacggtaacgggaatggtaatcgtaaatctattggggttgaaatttgctactctttaagcggtggagatagatattataaagcggaagacaatgcaactatcgttgtagctcaactaatgaaacagtacaatattccaattcataaagttcgtacacaccaatcatggagtggaaagtactgtcctcatcgtatgttggcagaggggcgttggaataactttattgaaagggttcaacatgcatataatggaggtagtagtctaattaacctaactcctactccatctttcagtggtgaaacaggtattgcatatatcggaggaaatagcgttaatcttcgtaaaggtccaggtactggatacgggattattcgtcaattagggaaaggagagtcctacaaggtatggggacaatcaaacggctggttaaaccttggtggcgatcagtggatttataatgattcatcatatattggttatagtggagaaagtacaccgacaactgcacaaacagtcaatgatggggtaggagtagttaccattaaagcggatgtattgcgtgttcgtaaaggtccaggaactaattatggcattgtaaaaaatgtgtaccaaggggaacagtatcaggcgtggggatatagagatggttggtataatgttggaggagaccagtggatttcaggtgaatatgtgaaatttgaaagataaaacatattatgtaaaagcaaatgcaacctatgtgcatgtgaagtaagagagaagtcggtccttatgataggaaccgactttttttgctaatatgtatctttaaaattctgaaaattatgtagaaatattcttttttattcttttttctacatttttttgttaccctttaatgtaagactattcagaaagaaggaagtgattttatgaatgctccagtgaaggggaatgaacaagttacgaaattacttaatgactggtatcaagcaatgttaacacaacagtatgtaaaggcgtcaaacttgaaagaaaaaattgatcatttaattaataatttacagcatgaaaaagacacagaattacaagaccaaaacttattattatattactctctactagattttaggtataaggttctaactgaaggtattaatatttcaccaagtgaatttgatgaaattgagaacttcaataaaccagtagacaattatttagcgtattactatcacttttataaagcaatacataatacatttttgtctaattatgcagaggctggggaacaatttgaagaagcagaatcacttctaaaatatgtccctgacgaactagaacaagcagaatttaattaccgtttagcaacattctactatcaaacatataagccccttccctctatagcgtatataaacaaagcaaaaacagctttccataataatgaaggctatgagataaacgtagcattatgtgaaaacgtactaggattaacatgtatacagataagacaatttgaacaggctgaagaacacttaaataaagcgatagatattgttaaaaagggtgataacacagaactgttattacgtcttagaaacaatataggatggttatatgctagccaggggctttcggctttagctatccgccacttatcagaaataactgaacatttaccgaaccattataaggctatctttctacaagctaaggaacactataaattgggggaacatacagcggccaataggctaatagaacaggggttaagaacgtctactaaaatagggaatcaagagtatatacacagatttaatatattaaaggaattgaataacaaatctgatttaaatacattagaaagtgtaatagaagcaggaatttcctactttgaagtagaagggttaacaaagtgcgttcaagaatatgctgaaattctcgctactatgttttataaagaagcgaacgacaaaaaagcaagtaaatacttttatatcagcaatgaatcaagaaaacaatttgaagaaaaaggggcgttagtgtgatgaaaaagttaaagtcagtattattacttcccattatggcagtagggtttattgcaatggctgaaggggatacacctgcaccacaaagacctgatttagcatatggtgaggggcatattagtggtataagtaaattagaagcacacggggatcatggcggtgcacccgcttacgaccacggaagaccgcctgcaccagcgtatgaatatgtgaaataacaaaaaagccaactttatttatataatagggttggcttttttggtgctatgatgtttagaatttacttttagataatgcctttaatatcggatttataattctacttattaaacgaaatcccttgaatatagagctaacaactttcataatgttagaatctctttttattttaaacacctactttcgcaattccgcttgtagaataaagttttcttttatactacctttatatgtataccttattttattcttttgataaacctttgtatgatctttgctaaatactgtttcgtcactaagaccaagttcttgtttaactaaattacgttctccaaaactcaatgaatcatctaccgttcctattaataataagaaagcgaatttgaaatctttttgctcagtaaagaaagcatttggtgtcatagctagcgaagcctttttaatatgtttattcttatcggtgtctaagaagataaaaatattatttgataaaccgattgaggttctgccatcttctaatacttcagttgaattaattttcaactttgttttttctcccatttcttttaatgctttttctattctttgtttgtattcatctactgttaatttagtttctttattttctgcaatcgcaggtttagtgctatcctttttattgccactaacaccagcagcaacaaaaattattaatagtgcagtaataatccaaacccaccattttttataaaacggttttttcatataatttccctccatagatttatacctaaatcataccaatttcatgcaacaactgtaaatggttaagtttctggtttgttgacaaaacagaacgattgttctattatttttatacaaacaaacgttcttgtggaggtcatcttatgaatcatttacttaaatgctctttcaatcaaaaaataccaattgaattaatatatttaaacggttcaggagatttctctcaaaggactgtgattgttagaaaagtatatgaagatcgtatattggtgtattgcatgaaaaaacaacaagttagaacactgaaattagctaatatactatctgttgataaagtaagaaataactatcaatacgcttaaaacacttaatgaggtgattatcatatggcaaacggagtaccaaaaccaccaaagaagaaaagtgcttcaaaaaaggaacctagaccatacatggatgaattcgaacagcaagaagctgctgaattaattcaatatgcaaagcaggatgatacagaattagtctttactgtgtatagaaaatataaagaaccagatatcattcaaggaaaaatcgttaaacttgaacaacaaatgggtagaattgtagtgagtaatggcccgaatataatacataaaattcaattcatggatattttgaaaatcgaaacgcctagttaatttagctaggtgtttttatatggccataaattctttatcaaagtagaacttgtccattaagttgtttacaattccgttgaaataagcgaatttacccttgttcatttttgttcccgctttaattttcataacaaactctttgatagcttgtaagccaatagtaagttcctggtctttagtaaatgctttatcacctgttatatggttaacgattttattacactgtcttacgaccttccacagttcttgaattgttttagattcactgtaaaaagagccaactaaagaaataaaacgctctggtacccaatgagcaacaaagtcagcttgttccatattctcttctggagtattgctattctcattactattacgtttatttatatcttttatattttgttttaaggaaatagattttgttttattggtgtgacactttttttcatttttaacaggtgcttgtgtgacaacctgttcctccacaatgattggttgaataacaatagcgttacatgtttgtctcatatcgattttacgcttcatttctagctgtttaataatacctaaagactctaggtgtaggcatactctaataaccgttctacggctaatattaaggtcttcagcgatgtgttttttcgttctgaaagatacgccaaagaacttagaagaatagttgtgtaatttatttaatacagttaattgagttttgtttaactgatcggcgaatttctctttgtacgcccgaacagttttatttaattcatcaatagttttgaatgttgctagatttttatatgtttcattacctgcaataattgtaattccttgtttcttttccatagtggtttgtctcctttttggaaacaaaaaagcaacgtcaccaatttggtaaacgttgcttaatagaccctgcatgatgtaaaatagctcatgagagtatagcaagtgtttacctggcctaatcaggtggacggtatatagagtgttcgtagcactttacatacacgctgtgctcttttgttttgtgtagattttgcacgctgaaataattttgcatgaattttgcacgattacttctggaaatctaaaggagccttgatataaaagggatgttttactattagttcgaatccctctgggcgcgtcaaaaagtcctaacttacgttttgtaggttaggactttttttatttacctcttgttatatctagtaataagatttactattagtacttgataataatttttaattttattattttctttcaatattattcaaatttcggttgtaagttgtaaatctcattaatacatataaattaataatattttggaatgggtgtctgcgtgaggattctccttttaccaaacttattgtacaatagaaacaagggggagattagtttgaaggcaagtcttttacaagaacaaagcttacgtttggcaatgacacaagagttaaggcaagcgattacaatgctccagtataatgtacaagaattatcggagtttttgtatgagcaatcgttagagaatccccttattgagttaggtggttttgagagggagaagaaaaagagctctaacaacagtaaaagtaccagcaaacaagtcgagaatcagatggagatctacagtgtggattctacaacgattcagcaacatttattaaatcaaatacagtattataaaatagatgaagaagagcgaaaagtagcttctttcattattatgaacatggatggaaatggatatttacaagaaacgaatgaagagttagcagagctcctttctgcacatattcatgtagtcgaccgttctgtagagcttgtccaatcactggagccagcaggggtaggggcgcgtaatattcaggaatgtttaaccttacaattgaagcgcttacaaagacgtaatggattagcagaagaggttgtagaagatcatttcgcttattttgtgaagaaagattggcgaaagctcgttcaagtgttgaaatgtagtaatgaggaattgcagagtgcggtaaattgtataacgtcattacaaccaaaaccaggtcttgcgttttcttcagataaaccactttacattgtacctgatatggcggtgaaaaaagatggcgatcgcctcgttttacaaatgaatgagagaaatatgccgagaattgaaattcattctgaatatagtgcgcttcttaataatagtgaaagtgaagtagcatcttacgtatcagaaaagtatcagcatgtgcagtggattatgcgcagtttgaagcagagaaaacagacattgctgcaagtaatgactattattatggaaaaacaacgtgatttcttctggaaaggtccagagtatttaagacctctcgctttaaaagaggtagcggaagagttaagtgtgcatgaatcgacaattagtcgtgcgacgcgaaataaatatgtgcaaacaccacacggtttatttgagatgaaatcgttctttagcaatgccgtttcgacgactgaagatgaagcagtttctacaaaacgtgtaaaacaatttattcaaacgctaattggggcagaggataagaaaaagccactttcagatcaaaagatttcaaaattattagaagaagagcatgaaattgttatttctcgaagaacagtggcgaagtatagagaacaaatgcatatcccagcttcgtcattacgaaaaacgatcggataggtgaagaagatgaaagttgtactgtatactaaaaaagattgtggcctttgcgtgaaggcgaaacaagttttacaggaagtacaatgtgaatattcttttcaaatcgaggaaatagatatatatgaagataatgaccttttagaaaaatatcacttaatgattccggttgtagaaatggacggaaaacaagtagaatatggtaacattcacaaaggtgtcataataaactatataaagaatgcagttaagagttgaataagtttctatctcctgttacaataatacacgtagcagggattatttttttaacctatgtgggacacaaaatgtcactacgggacgtaaagtgaccacgagggaaaatgaaccgatgtagtgaggagaaaagatatgcgctcatggattcagaatacaaaaaaattattacctgatctgctacctgttatgcaaacgagaatgcaaattcttcaatacattaggctcatgcagccgattggaagaagaaacttatcagcaagtctcggtatgacagaacgagtattgcgaagtgaagttcaagttttgaaagaacaaaacttagttcacgtcgcttcttctggaatgactttgacagaagaaggaacagctttagttcttgctttggaagactttatgaaagaaatttccgggttaaaggttttagaaaagcaacttaaggaaacattagacttggatgaagttttcgttgtccctggtgatagtgatgaatcaccttgggtcaaactggagatgggccgtgcttgtgtgacttgtataaaagaccgtctgacagcgaataatatcgttgctgtggctggaggaactacgctagctgctgctgcggacatgatgcaacttgattgcaaagatttacatatgctatttgtcccagcacgtggtggaattggagaaggtgttgaattagaagccaataccatttgtgccaagatggcgcaaaatacgatgagtaattatcgcttattgtatgttccagaccatgttagtagcgaagcatatgcgtctattgtgacagagccttccgtgaaagaagttcttgagttgattcgatcttccaatatcgtcattcatggaataggtgatgcgttaacaatggcacgtcgcagaagtacttcagaagcagattggttaaagattcaggcaagcgaagcagttggcgaagctttcggttactactttaatgaagaaggaaatgttgttcataaagtaagaacggttggtatgcaactagaggacttacaaaatgtatctcacgttgttgcagtcgctggaggttcttcaaaggcaaaagcaatacaggctgtaattaaacaagggcacacttcaattctaattacagatgaaggtgcagcaaaacagttaacaaagggttttaccctttaatataatcccccaaggaggaaattcaaatgactaaaattggtattaatggatttggacgtatcggacgtaacgtattccgcgcagctcttaacaactctgaggtagaagtagtagcaatcaacgacttaacagatgctaaaacattagctcaccttttaaaatatgacacagttcacggaactttaaatgcagaagtatctgctaacgaaaacagcatcgttgttaacggtaaagaaattaaagttatcgctgagcgtgacccagctcaattaccatggagcgactacggagtagaagtagtagtagaatctactggccgtttcactaaaaaatcagacgctgagaaacacttaggtggatcagttaagaaagttatcatctcagctccagcttctgacgaagatatcactgtagttatgggtgttaaccacgaacaatacgatgcagctaaccacaacgtagtatctaacgcttcttgtactacaaactgtctagctccattcgctaaagtattaaacgaaaaattcggcgtaaaacgcggaatgatgacaacaattcactcttacactaacgaccaacaaatcttagacttaccacacaaagatttacgtcgtgctcgtgcagcagctgaaaacatgatcccaacatctactggtgcagctaaagctgtagcattagtattaccagaacttaaaggtaaattaaacggtggcgctgtacgtgttccaactgctaacgtttctctagttgacttagttgttgaacttgacaaagaagtaacagttgaagaagtaaatgcagcattcaaagcagcagctgaaggcgaattaaaaggtatccttggatacagcgaagagccattagtatctatcgactataacggatgtacagcttcttctacaatcgatgcattatctacaatggtaatggaaggtaacatggttaaagtactttcttggtacgataacgaaactggttactctaaccgcgtagtagacctagcagcttacatgacttcaaaaggtctttaattcttaattatataagttatcaatgacaaaacgagggagagggtttgttccctctctctcttctttcgttttaaaagcaaatgtgttaagcttttgagtgggttttgtcaatcctaactagtagtcggagggaaatccaatgaacaaaaaatcaattcgtgacgtagatttaaaaggtaagcgtgtattttgccgcgttgatttcaacgtacctatgaaagaaggcaaaattacagatgaaactcgtatccgtgcagctcttcctacaattcaatatttagtagagcaaggtgcgaaagttattttagcaagtcacttaggccgtccaaaaggtcaagtagtagaagaaatgcgtttaactccagtagcagcacgtttaggcgagcttcttggtaaagacgttaaaaaagcggacgaagcattcggaccagttgcacaagaaatggttgcagcaatgaacgaaggcgacgtattagttcttgaaaacgtacgtttctatgcgggcgaagaaaagaatgatgcagaacttgcgaaagaatttgcagcacttgctgacatcttcgtaaacgatgcattcggtgcagctcaccgtgctcacgcttctacagcaggtatcgcagactacctaccagcagtatctggtctattaatggaaaaagagttagatgtacttggtaaagcactttctaacccagaacgtccatttacagctatcatcggtggtgcgaaagtaaaagataaaatcggtgtaattcgtcatctattagacaaagtagataacttaatcatcggtggtggacttgcttacacattcgttaaagctttaggtcatgaaattggtctatctctatgtgaagacgacaagatcgaactagctaaagaatttatgcaacttgcaaaagaaaaaggcgtaaacttctacatgccagttgatgttgtaatcactgaggaattctctgaaactgcaacaactaaaatcgttggtatcgactctatcccttctaactgggaaggcgtggacatcggtcctaaaacacgtgaaatttatgcagatgtaattaaaaattctaagcttgttgtatggaatggaccaatgggtgtattcgaaatgactccattcgcagaaggtacaaaagcagtaggacaagcattagcagatgcagaagatacatactctgttatcggcggtggtgactctgcagcagctgttgaaaaattcggtatggctgataaaatgagccacatttctactggcggcggtgcgtcattagaattcatggaaggtaaagagcttccaggtgtagtttgtcttaacgacaaataagtagcagccaaagaaaaaggacggtgcaaagcatgcgtaaaccaattatcgcaggtaactggaaaatgaataaaactctatctgaagcagttagcttcgtagaggaagttaaaggtcaaatcccagcagcttcagctgttgatgcagtagtttgctctccagctctattcttagagcgccttgtagcagcaactgaaggaactgacttacaagtaggtgcacaaaacatgcacttcgaaaaaaatggtgcattcactggcgaaattagcccagtagcacttagcgacttaaaagttggctatgtagtacttggccactctgagcgtcgtgaaatgtttgctgaaacagatgagtcagtaaacaaaaagactatcgcagcatttgaacatggtttaacaccaatcgtatgttgtggtgagactttagaagagcgcgaaagcggaaaaacatttgatctagtagcaggtcaagtgacaaaagcacttgcaggtttaacagaagagcaagttaaagcaactgttatcgcttatgagccaatctgggctatcggtacaggtaaatcttcttcttctgcagatgcaaacgaagtatgtgcgcacatccgtaaagttgttgcagaagctgtttctccagaagctgcagaagctgttcgtatccaatacggcggtagcgtaaaaccagaaaacattaaagagtatatggcacaatctgacatcgacggcgctttagttggcggtgctagcttagagcctgcttcgttcttaggtcttctgggggcggtaaaatgagaaagccaacagctttaatcattcttgacggtttcggacttcgtgaagaaacttacgggaatgctgtagcacaagctaagaaacctaattttgatggttactggaacaaattccctcacacaacgcttacagcttgtggcgaggcagtaggtcttccagaaggtcaaatgggtaactctgaggttggtcacttaaatatcggtgctggccgcgtagtatatcaaagcttaacacgcgttaacgttgcaattcgtgaaggcgagttcgataagaacgaaacttttcaaaatgcaattaaaagtgtaaaagaaaaaggtactgcacttcatttattcggtttactttctgacggtggtgtgcacagtcacatgaaccatatgtttgctcttcttcgcttagcagcaaaagaaggcgtggagaaagtttatatccatgcattcttagacggccgcgatgttggaccacaaacagcaaaaggttatatcgatgcaacgaatgaagtaattaaagaaacaggagtaggacaattcgcgactatctctggtcgttattactctatggaccgtgacaagcgttgggatcgcgtagaaaaatgttacagtgctatggtgaatggtgaaggccctacttataaatcagcagaagagtgtgtagaagactcttatgcgaacggtatctatgatgaattcgtattgccgtctgtaattgttaacgaagataacacgccagttgcaacaatcaatgatgatgatgcagttatcttctataacttccgtccagaccgtgcaattcaaattgctcgtgtatttacaaacgaagacttccgtgagttcgatcgtggtgaaaaagtacctcacattccagaattcgtatgtatgacacacttcagtgaaactgtagatggttacgtggcattcaagccaatgaaccttgataacactttaggtgaagttgttgcgcaagcgggattaaagcaacttcgcatcgcggaaactgaaaagtatccgcacgttacattcttctttagcggtggtcgtgaggctgaattcccaggagaagagcgtatcttaattaactcaccgaaggttgcaacgtatgacttgaaacctgaaatgagcatttacgaagtaacggacgctttagtaaatgaaatcgaaaatgataaacatgatgttatcattcttaactttgcgaactgtgatatggttggccattctgggatgatggaaccaacaattaaagcagtagaagcaactgacgaatgtttaggaaaagttgtagaagcgattcttgcaaaagatggtgtagcacttattactgctgaccatggtaatgctgatcaggagttaactgctgatggcggtcctatgacagctcatacaactaacccggttcctttcatcgttacaaaaaatgatgtagagcttcgtgaaggtggtattttaggagatatcgctccaacaatgcttacacttttaaatgtggaacaaccgaaagaaatgacaggtaaaacaattattaaataatttgcttatataaaaaggagagaatttattatgtcaacaattattgatgtttatgctcgcgaagtccttgactctcgtggtaacccaactgtagaagtagaagtttacacagaaagcggcgctttcggacgcgctatcgtaccaagtggtgcatctactggtgagcacgaagcagtagaattacgtgacggtgacaaatctcgttaccttggtaaaggtgttgttaacgcagtaaacaacgttaacgaaattatcgctccagaaatcgctggtttcgatgtaactgaccaagctggtatcgaccgtgctatgatcgaattagatggcactccaaacaaaggtaaactaggcgctaacgctatccttggtgtatctatggcagtagctcacgcagcagctgacttcgtaggtcttccattataccgttaccttggtggattcaatgcaaaacaattaccaactccaatgatgaacatcatcaacggtggttctcacgctgataacaacgttgacttccaagagttcatgatcttaccagttggtgctccaacattcaaagaatcaatccgtatgggtgctgaagtattccatgcacttaaagctgtattacatgacaaaggtcttaacactgcagtaggtgacgaaggtggattcgctccaaaccttggttctaaccgtgaagctttagaagtaatcatcgaagctatcgaaaaagctggttacaaagctggcgagaacgtattcttaggaatggacgttgcttcttctgagttctacaacaaagaaactggtaaatatgaccttgcaggcgaaggccgtactggcttaacttctgcagaaatggttgatttctatgaagagctttgcaaagacttcccaatcatctctatcgaagatggtttagacgaaaacgactgggatggtcacaaattattaactgagcgtatcggtgataaagtacaattagttggtgacgatttattcgtaactaacactcaaaaacttgctgaaggtatcgaaaaaggtatctctaactcaatcttaattaaagttaaccaaatcggtactttaactgagactttcgaagctatcgaaatggctaaacgtgctggttacacagcagttgtatctcaccgttctggtgaaactgaagatgctacaatcgctgacatcgcagttgcaactaacgctggccaaatcaaaactggttctatgagccgtactgaccgtattgctaagtacaaccaattattacgcatcgaagacgaactaggcgaaatcgctgtttacgatggtatcaaatctttctataacatcaaacgataattgtaggaaataaacgacagaccgtgagaaatcacggtctgtttttttatgctaaaattgttcacccgtcataagtgacatgaaatgtttgaagaagcggttatagtcaaaatcaattgcgatttgatgaaccggccaatcaataaatggcttctggttcactagagaacgaaattcccctatgcttgctccttgtgcagaggattctgtcatgacaacaataggtgatttatgatacgtgaacatagagttatcaaataaagcgagtattggcattgtgtcatggaaggggctcccctttaaatgtggtagggcgtctttataatatccgtagtaataatgatcaaataacggtttgacaagtggagcttttccttttgcctcaatgtattctgccatttctggtgtaatgatggagtattgagtgacgtttaatgggtatatgtacatgttaactgcggattgaaggactatattagcagcagtaggatcgccataaaagtttgcttcggaaataggggtaacattaccaggatgtaaaaaggcaccgcccattacgtagtaagatttaatttgtttcattaactgtttgcacatgataaacaaaattgctagggaggtaagtcttcctaaactcacaatgattaattcatctttatactgttcaataagaggaatgacttcaaaaaaattctccatttctccgttagtcacattcacctttggaataattggaccgagcccctgtttcccatgtacatccgtaaaaaacgcaggtgaggcaccagtaaggggacgttctgaaccaccgaatatcttgatatttctattctttgtttcgttattaaaaaaatgagcattttctacggccgttttttttggaacattgccgtaatcagcaacgataccgacgatttctatttcatcgataaagaatgctaagaggagagccatcgtatcatcaatcccaggatcacaaaaaatgagaacttttttgggcatatgttcaccacctatcttgtttatccggtacaaatccgcttggtgagggctaataattaatggggatgaggaaaacctcaatgattaaagtttcactttatatatatgtaagtttaaggataaaaagattattttattgaaataatagtcttttaaattcagaaaataaaaactttttatattaggtcaaggtttttgacgtaattttcgtttagaaatgcagtcatatcaaggttgtaagcgtataacataggctgtttttgctgtcaagttgataaattgcagctttttacaatttatactatgataaagatattaacagaagatcgtataaacatgagggatgatgaacatgaaatttacaaagattcttgtccaaattgctgctctttacgtgttttatatggttggaacttgggtgcaagaaatgttaaatattccgattccaggaagtttgattggaatgttcctcttacttgttttacttagcctaaaagttcttccagtgaaatggttcgatttaggagcagaaacactcgttgctattatgccgtttttattaattccgccaacgcttggcctaatgaattacggtgctttttttatgagtaaaggaatttctcttttcattacagttgtagcgagtacatttttaattattattgtcgcaggacatacaggacaatatcttgcgaataggaaggaaagagagtcgcgatgagccaaatattaatcggaatcggttgggttctttttacggtgctattatatcaattatctaaaaaaatctataaattatttccaacaccattcaccattccaatgcttgtagcaactggattaatggctttcctatttatcgtgcttgatataccatatcaacattatatggaaagtggtggtggctggattgcaaagctacttggacccggtgttgtagcatttgcaattcctctttataaacaacgtcatgttctgcaaaaatatgttgtaccgattgctggcggggtattagtaggtacaacagttgcaatcgctagtgattttgcgattgcttcacttatgggaacggataaaagcttaatcttatcgtcattaccaaaatcggtgacaatgccagttgcgatgagtgtttctgagcaagtcggtggtgtaccttccttaacagcagctttcgttgttatcgcaggtattactggaacgattacaggacctcttttattaaaatggagccgtgttacaaactcagttggtaaaggtatcggatttggatgtgcttctcatattatgggtgttatgagagcgatgaaaaataacgaacatgaaggtgttattggatcggtaacaatgacattaacagcaattttgacatgtttacttggaccgttatttgcgatgatgtttatgtaatagaagaaaagcgagagcgcctctatagctctcgcttttctatagaatttatgctacagttacaataactgaatctttgtaggaggtacgccaagtgcatacgttattatcagttttacttattattgtatcgattttaatgattgttatggtacttatgcaatctagtaatagctcaggcctttcaggtgcaatttcaggcggtgcggagcaattatttggtaagcaaaaggcacgtggaattgaagcggtattaaaccgtattacaattgttttagctgtattgttctttgtattaacaattggtgttacgtacttcaatttatagaattgaaagaagaagcgttagtgaatggtactaatggttcttctttttttgttttgctatttgaaagatgtttctaattagattatagaaatacaaatatggtacactagatatagaaagaatacgactagattacagaagagaaagaggagaaatacatgatgaaattagcatctccgaaaccatttacatttgagggtggagaccgcgctgttttattactacatggattcacagggaactcagctgatgtacgtatgttagggcgtttcttagaaaagaaaggctatacttgtcatgcgccaatttataaagggcacggtgtaccaccagaagagcttgttcatacagggcctgaagattggtggcaagatgtaacggaggcatatcagcttttaaaagataaaggttttgagaaaattgctgttgttggattgtcacttggcggcgtattttctttaaaattaggttatacagtaccggttttaggtgtagtaccaatgtgtgcaccgatgtatattaagagcgaagaaacgatgtaccaaggtatattggcatatgcccgcgaatataaaaaacgtgagcaaaaatcacctgaacaaattgaacaagaaatgttggaattccaaaagacaccgatgaatacattaaaagcattacaacaattaattgctgacgtacgtaacaatgtggatatgatttatgcgccaacatttgttgtacaagcacgtcatgacgaaatgattaatacagatagtgctaacattatttataacggtgtagaatctacgttaaaagacattaaatggtatgaagactctacgcatgtcattacacttgataaacaacgtgacgagctacatgaggatgtatataacttcttggagcaactagattggtaagatctagttgcctctttttttcataaggaattttttgtgaaaactgtaaaaatcataaggggagtattgaagtttcactttatacatcccctatctttcggatacactaaataatataaggttttaaaggaggtatttttgcttggaagaaatcatacaagaacatattgataagttgttattatttatgagagaagaagcgtataaaccgctaacgatacaagagttagaagaggcatttgggattgaaggttctgagggctttaaagatttcgtaaaggcacttgtaacgatggaagaaaagggacttgttattcgtactcgtagcaaccgttacggtcttcctgaaaagatgaatttagtaagaggtaagttaattggacatgcacgtggttttgcattcgttgtaccagacgagaagaaaacgggagacgatgatcttttcatcccgcctacagaattaaacggtgcacttcatggcgatacagtattagcacgccttagttctcaatcgagcggttcgcgtcaagaaggttcaattgtacgcattttagagcgtggaacgaaagaactagttggtacatatacagaatcgaaaaactttggattcgttatacctgacaataagcgctggacgagtgatatctttatcttgaaaagcgcatcgatgggtgctgtagaaggtcataaagtagttgtgaaaattacgagctatccagagaatcgtttaagtgcagaaggtgaagttattcaaattctaggtcataaaaatgatccaggagtagatattttatctgtcattcataaacatcatttacctttagcattccctgaggaagtgatggagcatgcaaacagtgtaccagaaacgatttcagaagaagatttaaaagatcgccgcgacctgcgcgatcaaatgatcgtaacgattgatggtgcagatgcgaaagacttagatgatgctgttacagtaacgaagcttgagaacggtaactacaagctaggcgttcacattgcggatgtaagtcattacgttcaagaaggctctccaattgatgttgaagcagcggaaagagcgacgagtgtatatcttgttgaccgtgtaatcccgatgattccgcatcgtctatctaacggtatttgttcattaaatccgaaagtagaccgtctgacgttatcttgtgaaatggaaatcaacaacttaggtgatgttgttaaacacgagattttccaaagtgtgattaaaacgacagagcgtatgacgtatgctgacgtaagaagcattttagaagatgaggacgaagagttaattaagcgttatgagccgctcgtaccgatgtttaaagagatgggtcaattggcacaaattttacgtgaaaaacgtatgcgccgtggtgcaattgactttgactttaaagaagcgaaagtattagtggatgaagaaggaaaaccgactgatgttgttatgcgtgatcgttctgtttcagagaagttaattgaagaatttatgcttgttgcgaatgaaacagtagcagagcacttccactggatgaacgtaccgtttatgtaccgtgtccatgaagatccgaaagaagataagcttgagcgtttcttcgagtttgtaacgaacttcggatatgcggtaaaaggacgtgcgaatgaagtgcaccctcgtgcgctgcaacaaattcttgaaatggttcaaggacagccagaagaagtagttatttcaacagttatgcttcgttctatgaagcaagctcgttacgatgcggatagtttaggacatttcggtttatcaactgagttctacacacacttcacatcaccaattcgtcgttacccagatacaatcgttcatagattaattcgtgaatacattattaatggtaaagtcgacaatgaaacgcaagcaaaatggcgtgaaaaattacctgagattgcagagcactcttctaatatggaacgccgtgctgttgaagcagagcgtgaaacagatgagatgaaaaaagcagagtatatggttgataagatcggtgaagagtatgacggtatgattagttctgtaacaaacttcggtttattcgtagagcttccaaatacaattgaaggtcttgtacacgttagctacttaacggatgattactaccgttatgacgagcaacatttcgctatgatcggagaacgtacaggaaacgtattccgcatcggtgatgaaattacaattcgcgttattaacgtaaacaaagacgagcgtgcaatcgactttgaaatcgttggcatgaaaggcacacctcgccgtaagttcaaagatcgtccagtcgttatcgaacagccaagaacaggcagaaagaaacgcggtggacgtagcgagcgcagtagcgagcgcagtaatgagcgcggcggtgaacgtggcacaggtagaaaatttgaccgtggtggcaaaggaaaaggaagaggatctgcatctgcatccgcttctgctagccagccaggaaaaaaagatggtaacggtaagaagaaaaaagcattcttcgaaaacgtaccaggattcaagaagaaaaagaaaaagcgtaagtaagaaaagagtggcttcgctttgatgaaaagcggggccgttttcttttttcttcgtggcttgagagcgagccactttcgctttttattaacatttgttacaatagtaaaaatagaggagggacgttatatgccaaagggtacaggtaaggttattgcacagaataaaaaagcatttcatgattatttcatcgaagaaacatacgaagcagggcttgtccttcaaggaacggaaattaagtcaattcgcgctggacgcgtaaacttgaaagatgcgtttgcacgtgtacataatggtgaagtatgggttcataatatgcacattaatacgtacgaacaagggaatcgtttcaaccatgatccacttcgtacgagaaaattacttctgcataaaaaagaaattgataagctagcgggcgctgcgaaagaaacaggttacgcattagttccacttagaatttatttgaaaaatggatttgcaaagatggcacttggtttagcaaaaggtaaaaagcaatacgataaacgtcacgatttaaaagagaaagaagctaaacgtgaaattgcacgcgcgttccgtgatcgccaaaagatgtaatacagatatttacatttgtaaaatggagcgcgtatgttataataacttatgtaagattgttgcacattgaaaaacagctcttagtagctatcacgatattttcttcgtatgctccatttttatcatggggacgttacggattcgacagggatagttcgagcttaggttgcgagtcgaggggatcggcctcgttaaaacgtcaaagcctataattggcaaacaaaacaatctttctttagctgcttaattgcactaaaggttcctccctccatcgtccatgtggtagggtaagggactcaaactaagtggactacgccggagttcgccgtctgaggacaaaggaagagaacaaccagactagcaacttggaagcctgtcgataggccgaagagttcgcgaaatgctaatatatcgactacactcgtagaagcttaagtgccgatatttttggacgtgggttcgactcccaccgtctccaccaatacatatttggtggtttttttattttttataacaggaagcataagatggccgttttggtcaacttatgcttcttttagtttacggccaacttatgcttccaggatttgaagaatatttttaatgtcgcctttaaataaagtcgcgacttttagggatagcatcacatcatcatcaatctaagaatagcaaataccccaaaacgaaaaaaatgtacatttttttcgttttggggcgttataaaatccttaagttgatgggcatatggcgactcatttctagaattgttttcatgtgtcaatgatagaaatatatttttaattatggctacttttcaactagtacgatatcatcaagataggcatcaccgatgttaacatatccattaatttgtaagatgaccttatatggattattagtatttagagtagtaaattcaaccgatttttgttcatactgtgtggaagtaaacgtcataacaaatgtgttttctcccccaggagactgtgctcctacaaataaggttttttcaggacccgatacttttccagatgcggacatgatgtatgtagtattaggcttcaaagttacgtctcccttaagatgaccagctcctgaactaaaatgaagtcctttagaattatttactcctgcatgctcttcaatattgtaaattaaagagccatatgctggtttaaaaggttctaaacttgaattgtggtcaaaatcaatatttaaaatataagggttctccttctcatttaattgtacattatcaaacttaaccctcccatttgctgtagaagcaagtttgacagcaaagtttgacacatcttcccctgttttaaacttcatctcatgatgttccggcttaaatcctgaatattgcttttttgttaatggaatgatttcttgatgggcattcagattacctactgttacttctgatggagaacctatacttcccgctatatcaaatgttaatgtatattctgtattcggctttacagtaacaggctgataggctgtgtcggcatgtattaatttgagataatgattgcctggttcagaagtgccgatattctcggtagaagaattaggattagataaaatccagttatttagcccatcctcaaaatctccattcttaacttgttcatttgcagatgaactatctgctgatacaatacctgaaaaacctatactggcacttaatacaattgctgtagaaaagactcctataccgactttttttaacaatctcttcatctcctttggtcagattaaaatttactttttcatatttctatatatgtttggataaacctgacaaagaaccattttaacaataaataaattatgtatccgagatttaggttattttcatttgaaggagtagagggagcaaccgtgctgtgaagtgcaaagtagctccatctatccctaaatggtcctcttccacccaaaaacaaggagaacttttttattgctcaagtattaggggtcaccatacatgcccatcaacttaagaatttgcactacccccaagtgtcaaaaaacgttattcgccatttgataggtctcataacccttttgatgaagtttatggggtgagctgcttgagggaaaacctcacgagcagttcttatggggagaggctggaaacggatcacaactgataccgcgccagtcttttacccgacaaattttgttcaaaatatggaaatctttttttaaaattgacaggtgcaaagaaattaagaaagaacgcttagaatgccatttatatgggcaactcattagtattttactctgtttatcgacgatgttcaaaatgcgtcagttactcttggataagaaaaagaaagagttaagtgaatacaaatccatctatatgataaagaattattatcaattgttttatgagggactacaaaagagcatccatgaattattaaaagttttgctgcgtttgttttaccttttagagaaaaacgggagaaaatctcatcggtatgaaaagaaaaccgtttttgatattttaggtgttgtgtatgattatatgttgtcaaaaagtttcaaggttgcataatattttttaaaatgcccagttaataggtttatttgttatgcctatctttagaacagtcgtagaaatttaaaggaataatcctcacatataacctcttagcgccctaaggttgatggcgatgtggcggcatcccattgctatcaacctaacagaacaggttgatagcaaaagttttttatacaaaataacatcaaaaaatacgtcttgaacaagtgttaaaaaagaaagctgaagggcaagtatatccttttggagtctttttaagagaaaatgatacaatgaagataatattaggaaattatggggatgattacgttgcttactttaataaaatttgtagttagttatgctgcaagtctatttgcttttatttttggatggttcttaatttcatatatttttaatcctagctttattcacccggacgttttacagggattcataaaaactatcgtcacttatggtagtataccagctcttatagcttgtttacttggggaagtcttatataggaaaattaaacgatgtagagagtttcaatttggaattcctttatttataggactagcattgatctatacacttatactatatctttttctttttacttttactttttcacatttctttgacttcgttgcacctgttattatgggttccttagcattttatttagtacgtagaaaaatataattttcgttttgatgcattataatagctatctctgaatcaccagtttcaaaaagccttcatgcaatgatgattgcatgaaggcttttgatgttttcttatttttttgtatcgttaacccatgtaataatgtcctggatgacgtattcgggaacgttagcagggatttcgtattcactaggaagacttaattctccgtcaccctccgtgaagaaatgattcaatttcggatattttttgaactgaacattcccgcggtttgaaagtcctttctgccattttgtatattcatcttttactgttacttgataatcacgtgctccttgcagaatgagtaaaggctcttttcgtgattttgcctcttcaactggacgcaacctagaaacatcatacataaaatgaggtgacccaaaattgtagccagctggaggatggtcaggattgaaagtaggatcctgaataaaagcagcctgtctttttagttcatcgatttcttcctttggtttcctaaggtattgatactgatcaatggcaatgtcagtcaaagggcgtgcaggtggtgcgagtaagatgcttcctcggacaagtgaggaaggtgctttgcttagtatacgtggcattgtgccagctcctaggctatgtccaagaatgaaaatattatttggatcaatgccttcctgctgcactgctgactttgctgcatatatggcatcatctgtagtatcacggtctaacgtaacaggttctgcactcatctttaatgcatgttctaaggtgcgtttttcatagcgcaacactgcaattccgttggatgaaaggcccaccgcaaggtctcgtaagatttttgttcccatatatgtgctatcgcgatcatggatgccagcaccatgaacaagaacaactacgggcagcttttcaccacgcttatgtttcggaactgttaatgtggatggtaacggataggtagaatttccaatgacgatttcacgttcttgatagaaatcaggttgatcatagctaggatgggggatggtaaaatattcctcgggtgacctttctccaacttcatctactttcccgccaggtgtgaatttaaggagtagcggtatggtagttccttcggtagctgctggaatttctaccgtctgatggaccaagtttcgttcttttatcacgggggttcccatgctttttatcctgctccagccactttgtgtccaccagttttgtaatgtggttgctgtaaacttggattgaaaagcagcagacgtcaactgtattgcctctgcatacttaccttgctggagatattcaaaaaataatgatgtacgctccattaaagagactagtttcttttcagcagattgttcctcatgtgtatctgcgtgaatagttgttgtaagcgggaaagatgaaacgcctaaagaaaagagtagggtaaaggtaaggactgatttttgtattttcttttttttattcatgtttcaacctccaatatgtgatggtacaaaacaggtatggtaattagaattctggtgcgaaaacttcaaaatatttgcaagcaatctccaaaacttggacatactaatattattattctaaaaaaatgtaaatttcttctcttgttacatgcatattaatcccagaaataatctttcttccttcactttatattttgattatacgaagcaaagctctcgtttttcttacttgatacttacaaattccttaagtagaggatattttaaaattttggctgtatgaatatgtagcggtactcctatgttaagagatagcttaaggaccgaggattatattgtttttataaagagttgatgttatgtttgttttgtaacatatggtgttttatgcatgtaggaggatttattgaagaaattattaatattgtttttattagctacattttgtctacagattacaggatgttctaataatatgggtacactaagggagaagtctaaaactttaacaactgtgaagtctaaacgcatcaataaagggtggtacaaacatatgtaatagtttgtatcaccctttgttgatgttagaagtcataaggaaaaggttgatagttagatatttttcataaagaaaagacacccatataagagtgtcctttctaatagttttttagcagaagcaactgcatccgataatgattaatagtataaagagtacaacaagcaaagcaaatcctccagcaaaaccacagccttctccgcaactaccaccatagcccataatagttcctcctttaggtaagaggattaaaactaaggttcattcatgtattttaacgggttcactttactttatgtttttaagaatgaatggagcaggtccttttaaaaataaagaaaagacccccctaaagtgccttccttcaacttgaaccatcttaattttaataatatattggactcctatccgaatactattttactatgctaatttttttgttcattgaggggtagcaccacatcgctatcaagttaagtccatacaacgttaattatagtagaggttgtttcttttttttaaagctatgtgtagggaatttaaagatttgcatacgaaataaaccctaatgggtttcaattttttgatttaagccccttgattatcaaacatggtacaattgtaaatgacacctaatatatcaaagattgttttcttctcatatcgatgagatttcctcccgttttgctgtaggaggttgaacgggcgaagtaatacctttgatagctcttgggtgtctttttgtatcgattggaaaagaagaaaaaagtaatctttaatcatatatatggccttatattcactcagttctcgtttctttttcataagaagtaattgacgcatttgaaacatagtagacgaacagagtagaatggcgatcagttgcccatacaaatggcattctaatctttcacgttttatctttttacaatggtgaatatgaaagaatgacttccatgttttaaataaaatctcgatttgccaacgtaaagaataccgatcatgtacttgtcccatcgggacaatatttgtagaggcgtttgtcatatatacattgataccactaagtcgtttgctacgaggagaatacttcattcctttctttttttctcgtatagcttgatcacgtaatcgtttttgttgttgttcatctgtaagtcgatgaacaatcacacgagctggcactttatcagtcattcccacataagcgtcggatatttcatatgtttgtcctggctgaagagagttcattaaaacctccatatctatttggatatactctgtacccttcttaattctgccatcttgaaaataatcagggtttagatttttttgataaatacgtgtatttgatttgatacgtgagatataataagcctttttatcttgtatatgttgaagatctttcaaatgaaaataacctaagtctcggatacataaatcattcgctgttacagttggggcacacagggaaccgtaggttcgatcatgttgtttacctggacctgtatgaatatgaaggaattgtccacttaataaaccatactcaagctgtatctttactcccgctgtatggctgcatcctcccgcaccaggataaattgatgaaaatatatccggaagttgaaatgcagttgaatctaaaatacgaatacgcttgaaaacagaagtatatggataagaaattggcatagatgaggtcagtttttggtttagtagttcagctaatatgtgttgtaaaaattgaacagccgctttattaaatcgttgattcaagccctcagggctgatgagtacttctgttgatgcttctaaacagctagataactgagttaaagaagtcatagctacattttggctcacccatacacataaagcgactaaatcttttgcttggtacttactggttcgttgtacaaagccaacatctctagcaagatttcgtaaggcatttggagatagggcactttgaatctcttgagcaaatagttgtaattcgttagacacagaaacagacataaaaaacgccatcctttcctatgattctacagaaagaatagcgtattttttcgttattttatagtaaaataggtctcatggtatgaatgtacaatttagatatttgcccaatgaaccatatgcttttagaactgagaaagaccttgaaacaaataagttatatattttaatgcagtaatattacaagcagtatagatgggaacatcaagaacttaaatgatttaagattcacactatataaaagttgaagtatacgactaaggaaagagtgctttgcagtgtgctgcatattcaagaattaatcttacgtagggagtgcttatatgaaaagcatgaaaaatgtaatattgctagtagtatgtttcatatttttaagtggttgtaatcaagttaatgaagatgaggtacaaaaatatataaaagaaaaacacggaatcgatgttgttgtaacacatatgagccctttaaatgaaaataatatgggacatgcataccatactgtgcaagcaaagaataataaaaatattcaatttcgagtagaggtagatggtctcttctattcatccataaaaagtgatgaatacaaatatggaaaaaaaacatttgaggcatatcagaaattccaaccaactctagaagaaataaaaaaattagggtacgtggaaactaaaactgataacactcttcaatatttgtcagaggatagaagatcagatgaaggaaaaccaactaatgaattattattaactttgcaaatgagtaacgagattgactttagccaatttgaatcagtagaattagatcgtttatatactctatttcaactcatccagaaaaataataaaaagataacagaacttgaaattaaggattataatggcaaatctttaggtggaccttttaaaaatgtgcaaaaaatgataacaaaagaagagctgttactaacaatgaaaaaaacgatgggcaatgccatagacatttatttggaaaattggattaaaaatcatacaaaaatagaagagagattaattgcaattcaaaacaatcattttgaattggaaggtattacttattcaaatttgaaagatggggatgttcgaggatataaggtgtatttagttattaataccagtagtaatgaatttgaaaataatccccttgtaattaaagatttaatcaaggtaaccacaatccttaaagaagaactatataataaaaaatttaagatatatttagacaataagaatggaacaagatatacaccttggttatcatcagaagaaattaaaaaagctattaacatcgaagaacttgtaaaagagcgatatcctaagaattaaatttaaagtactgttgctgtttgttatttgatgggaaagcatgatatttcgatttgttccgccagcttgcaaattaggggtctgttgtaaagtttattaacaggtagaaagttagaataagtatagccgaatctgattgaagaggaagtacgacatcatcttaaattaggggtacagacacatgcccatcaacctaaagttttaatacacccccagaacgaaatttttaggatttcttgtaacgaaaaagcttatttatcgttttgggggtgaactgttttcttaggttggtagcgatgtggcgagacccctaccaataaatagatagctaatcagtaatgtggaaactgaataagcaaaaactctcatacatgttgcaactccaattaaaataagacaagctagaattgccttttttgctccatacttcttattcaccttaactgtaaataatgcaaacacgcccatacataatacgggaatagatgtttggtggtgtaattatttatttaatcgtttcagtaataactctcgtaagctgtccgatagtgcatccacctcaattatctgttctattgcttctatattgtatttgtcgtggaacttaacatgattgacttgtgaaattgatacttttttaggatgcgatgcaacgagttgtaaaaaaaaacgacctttaatcaatccttttttttacatttcctttttctaaaaccacagaaaagataagtactatagttaacaccataataaaccttacttcacttccatcacttagaaaaaatgaatacaaagtataaattaaaattaatattccataaataattttgtacaatgaacttccaccttctcctatatatattttagtataaaagtttaattcaagtcctagatcaaaataaaaataaaaaggacctgtgatgtacacaaagtgcttttctcttgtcaatttatctattttcactatacttatctattttctttttataactcaaacttcttagaaccgtacttttagctttttgcaattcattttatttatatggaatatgtttttatctgtctgtacatcttcaacattttctccatctactaatggcgtgccctgttaatactgttgtaaccccctccttttgtttgattacttgtatcataaaacaagtatctgaagtttatatgtagtctatctagaatctatgtaaattaaaaaaatttctaacaaactgtttgtattgtaacgttaccaccaaaactattgctctaaacaccataatttgaagaaacagtaccccatgttctaaccctcaattcctcctacacctctatgttgagtaaaactagttaatctctataatataaaaagagcaccccttttgggatgctcttcgttataactatatattatttaattttcttcatttgttggtaccatttttccttgttgagaatccgtacctgtaccttctgatttttcaacagtttttgcatgttttccaggttgtgattctgtacctccatttgtttctaccatttttccttgttgagaatctgtacctgtaccttctgttctttcaacagtttttgcatgttttccaggttgtgattctgtaccttcttttgtttctaccatttttccttgttgagaatctgtacctgtaccttctgatttttcaacagtttttacatctcctttagatgctggcactgcatctttaggtaaatcaaagttttgtgaggaagacgttgttccatctgcactctgtgtaattacttgatttgaattttcatttgactttaaattgtccgttttcgcatcatctgcaccaattgcaccacccgctaataatcctgtacttaaaaatgctcctgctaataatgttttaatcatttttcattacctcctgtttatttgtaatattcatcaaaaaagtatctagagttaatgttttagtcattatctttatctacttgctttttgattacatttagcataaggcaagaatctatagttgatatggactgtatctggagattatgtaaagaaaaatagatgatcaattgtatatcctaatgaatgcttagacaagattaacattttatatgagtttgatagttgaattatcctttgtttttgattgtaaggtttatggctggggtaaagcaaattaaggacctaatcttttctaatttggaagtaaacttttggataaaagtttacattggagttttgaatcatttatagttaattttgtaataaatttctcaatattgatatacttgttaattatggttttaatattcaaaattaataaaaagtattgtagttcttgtgcgaaaagattcagttcatttgagatgattgggttcatcaaaaacgccatcctttctgtatatttctacaaaaagaatagcgcttttttgttttatggatacagatttatcttagcttaatagcaattagtgtaacatccatgtgtatacatggtctttttcatactgtctacctaaaggggataatatcaatcaaaagcgggcttttgatattctggtttaggttaactgcaccactttaaaacgaataggactccccatcagatggcactaaaatagtgttagataatcctttcttatcaataaagtcattcaattcctttctggttaataggcaatggttaagtgattccatatgagaaacgataattttggcctgtggtgctgcctgttttgtgtcataaatatcctcttttgtcattgtaatagggccaccttctagaaactgagcagcacctccattgatcacaataacttcagggtcgtgcgtgtcaattgcttgttgaacatcgttacaccatattgtatcacctgccacatacaatctcggctcgtctggatgattaaatacgatacctgatacttcaccggtaaactttgtgatttcgccagttccatgttgtccatttgttttaaatagcttaatttcttctatgttggtaacatgctgtaaagattctatattgtgaaagccttctttattaatagcctcaatatcatgttcattttgtgcatagatttttatatccttaggtaaaacttttttagcaacttcgtcaaagtgatcaggatgtaaatgcgtgatgataaccgcatcaacctgaataatttcttctatagaaattggtaaactaactaacggatttctcatatcttgatttggtgtatttggaaacggtggaatggatcctttgtcagctaaaaaaggatcgatcaaaaacttcttgtctgcataatgtacaacaagtgttgcattacgtataagtctaatatccatgcggtattcctcccttttatatgattcaacaatagtataaaatatgagagaaatcatgttacatagataaaatcaaaaatttataaggtttgacttgaaatgtgaaaggatgtgtcacggtgttagatgatacagataaaaaaatactagaagcgttattgaaaaatggccgtacgtcaatgaaggaattaggagaaaaagtccatctgacagggcaagcaacctcatctagagtaataaggctggaagagaaaggcatcatagaaggttatacgattaaactgaatgaaagaaaactaggttactatgttcacgcatttataaatatttatacaaggagcattcaacacagttcctatttatcatttgtaaaaacacaacacgaatatatcataaagaacttcaaaattagcggtgaaggttgttatcttctagagtgtaagtttccatctaatgaagcccttgatcaattcttaactcaactaaacgaacatgctaattacaaattatctatcgtaattaaatagaagaaccatcgatataaaaaaacgctattcttgctggagaaatatatataaagaatagcatttttttcattttagggaaatgttgttttataatatcccaaaacaagattttatgctaatttgtaataaaaaagctcattttttcgttttggggctggtttgtattcttaagttgatgggcatggggtaccgtctgcattttggaaaaaccccatgctaagcaaaaaatacgatgagccgtccatacggacggctcatttacataattttcgttagcggaagttattttaaaagttctattaaacaacaaaaacagtcttgattaatcaagactgtttttgtttgtgaaaaatttatctatcagtttagaatctttgttgtttagtaaaataccttgtgtatgttttttgtctgtatctttagcaattgtaatttcgtttttatcattgatcaaaacgaaatattgttctttggaatcatcttttaatgtaactgtcatgttagtgtggattgaatcttttgtttgtttatctagtgagatttctttaggtgttcctgtttcgatagctgttttgatagcttttgttatttcttcattgtctgttgttgatttagagtggctatcttttccagcggaatctaatctgatttcctgtatatctttctcttttaattggatagttgcactttcttttgtatcagtaggttttgatgaagaaagattagaacatcccataggaattaagaataatatgctaagagaacataactgtagaatctttttcgttttttttcattgttttcaccccttccttttaattgtaataatattctgataaattcgatagactttttatttgaatacctttatgtatgattaaaaattggatgtataccatatgcatatgaagttaacataacgtctcattatcagtagcaaagagaaagacgttcccttactctcacaagggatttttctttttctatgactctatgcatctttatatacattcttattctggggcgccttttggcttccttatagttcccgatgtctccctattttttgcataagttcttgcatactcttagcgtgttttttttccgaaatgctggcaggacacctaataacaacactataaaaagacttaaattcctcataaggattaagtcttttttcatctcacctttatataaatataaaacaaaatataaaaacacttagcttattttttgtttttggaatacctaatttcttaagttgatggatgtggtgctacctctcatatatcattacccaatatttttcttctagctcaccttcttcaataacttttttccagcccatattctcataaaactttaatgctttttgatttttagaaacacactttaatcttaatggtatattcatcttttctatggaagcatgaagtaactgtcttccaacccccttaccaaagaactcaggatgtacaaataaattgtgtataaagttttcaggtaaatataaagaagcaaatccgaggatatgattatcttcctctgctagtagtatatgttctccttcagtatgtttatcaaaatcttctacagtcatttcatttctatctagccaatgaaaactttcacgccgtgattctaaatatatccttcttaaattagggtagtctaatgcagttgctactctaatattcattttctcactctctcttcctttttttaattaaataaatctaaccgtttctagagtaaacggttaaatttacgagagaaatttattcactcgtatctctttaaaacaatggctgcattatgacctccgaaaccaaatgagttagatagacctatatttattttcacttggcgagcaacagatggtacataatccagatcacataatggatcaagattttctaagttaattgttggaggaactgtcccttcctttaagctcattgctagagcaattgcttcaactccaccagctgcccctaacatatgaccaagcatagatttattagctgttaccggaatctgataagcttgttttccaaacagttgcttaatagccatcgtttcagagatgtcccccacttttgtacttgttgcatgggcactaataacatcaacttcttcaggcgatatattggcattttttaaagctgatctcattgcaagataagcacctttaccttccggatgtgtagctacgatatggtatgcgtctgaacttgcaccatatccaatgacttctgcataaatctttgcctctctatgtaaagcatgagataaagattctaagattagaattccagctccttctgacatgacaaatccatctcgattttcatcaaatggacgactagctttagtgggattatcgtttcttgttgataatgctgtagcgttaccaaaactggctattgataagtctgttatagctgactctgttccacccgcaaatataacgtcagcttccccagaacgaattagtctaaaggcttccccgatagatgtatttccaattgcacaggcagaaacaggtgacatagaaggtcccatcgcattccacttgatactaatttgtgctgcagcagcattagacattatggcaggtactagagttgggctgactcttcttggtcccttctgcctaagtgcatcaacattttcaatcaaggtttcaatccctccgatacctgaacctacgtatacgcctaacctttctacatctatacgatcgaggtctaacttagaatctgaccaagcttgttcagctgcagccaaagcaaattgagaaaaacgatctaaacgtcttgcttctttctttcctaaaacttcatctgcatcaaaatcttggacgatacctgcaatttttgttttatgattggtaacatcaaaagtatcgatattgactataccagattcccctttaattagattgttccaaaatgttttgatgtcgtttcctataggagaaactacgcccataccagtaatcacaactctttccactttgcaatccctccaatcaataatatacttgtattttacagtcaatttatcctattacaaggggggatttatcctagtataactactactaggataaattgataagataaggagttttaaaaatgaataataaaacaaggcttaaagctctgtcggcattcttaaaagctaagcgcgcccaaattagtccagagtctattggtttgtctgccggaaaccggagaagaacacctgggttacgaagagaagaggttgcgcagttagcaggtgtaagcaccacttggtatacatggctagagcaaggaagagatataaaggtttctacaatcgtacttgattgtatttctaaagctttgcaattaaataatgatgaaacagactacttatatgacctggcattcgaaacaaattcagaaagtacaagtccaaaaaaggatcaatcaaagcttagcccttctttaatacgaatactagatgaattaacatattgtccaactatcattacggatcgacattgccatattatgggctggaatcctgcagctgctcatgtttttttagattttgaacaaataccaaataatcaaagaaatttgattcgtttagtattcactagaaaagagttaaaagcattggccgtcaattgggaacatttcgtgaaaggttttcttgctattttccgtacctattatggacgctatttagacgatgaatggtacagccagtttattgaagaaatgagtcgttcccatccagaattccagaatttatggcaagaaagtcaagtgagtaaggctccagacatgataattgaattcagacatgctaaagcaggcaaaatgttgtttaatttaacttcttttcaagttcaaggtgatatggatttacggtgtagtatctatacgccagtaggggaaacggatacagaaaataaattaaagcgattaatgaagagggtatccgttgaaaattaataaagtaagttcattacattagcaaaatgataatgattactgaacaaagtcattattccttatgggaaaaagagttaactttactttttcctttttgttcaatgggtggatggcgttagttgaaggatcatagaaatgaacagacttttttataaaagaatgaatcaattaaataaagtaagagcgtgtttcgaacaatttcagaacacataggtcatttatctctttgttctgtacccattaaagatttccacagtactaggtcaatctatcttgtttctcgtacagaaaagataggacgagctcttttttaaacatttatgacttagcccccatatctatcaccctaacaaaaaaggttacccaaaaactataaaaatgaacttcggtgctgtaaaaaacacaaaattatcgtttaggggcttctttaaagtcttagcttgatagcgatggtgtaccgccacattgctatcaagctaaggctaagaaagggcagtttcagaagggattttttcttattctaaaaaccagtgcaaatcattggggattctgcatatcaaataaatcctaacgggtttcatttttaaaattaagcggcttaattatcagacatggtccaattgtaaacgacacctaatatattaaagactgttttctccctgtatcgatggggattttcgtccgtttcgctgtaagagtttcagcaggcgaagaagaatgtttgaaaatctaatattttttagaatcgtaacctttataggtggagttgtattagtaaattcatgatagctataataaaaatttttaaacaataccaattaattttgtattttaaaattaatacttgcaaatccaatacaatctgtatacagattgtatacaaaatgtaacgagaggtgaaaatgatggcagaaacatatcgtaaagctaaggtattaaaatttctagacaaattacgtgaaatgaaagagatgaatataaaatattcacagatgtatttgataaacttaaaagaattaattcctcatatggagaatgatatattttttctggaaaatgtagaagaaatagaagatattttagaaaatctacagtttaagaaagaggaagaaaatattgttttatcaagagagcaactcatgttttttaaggaagcaactaatgctataacaacaatcaaagatatcaatattattttggaagaagctggagagttttttgacttagatattcctgaaagaaaagtgaaatctggaatggtaaattacaaaattcaatccattgatccaatggatatgactggtattaaaaagcaatattatattatgttaggggaaattggtgtatcataccctgatggaacaggcgatgaagaatttgtagcggctgcaaataaagtatttctggagtatgttacacataatgatattacaaaagtagatgatggttttattgtttcgctaccggtatttgcttctcatcaagtgataaaagatttaacgaatgcagatttaacagttcttgcaatgattcctataaaagaaaaagaataagaagtcatagaaaataagtaaatggctgaattgaaaaatcaagtattagagattttagaggaaatatgtgaaaccgatataataaaagaaagtccataaaaagctttgaatttcttgagcaaatagttataattcatcaaatacagaaatagacatacaaaaataccaccctttcctatgattctacagaaagaatagcgtattttttattttagggggatttttgaagaaggaattaatacaatatgtaaaaatactctgctatctagtgaacagttttatactttccgaataatagtcaaataaatggatgatactatacttatataatcattatcaggagaatctgcagatttgcaggtccttttttattttatcgaaagtaaacttttagccagcagtttattttcctactattgatttttatacgtatttggtgaaaaatcaaggagctgcaaaaaaatactataccgaaagttcggtatagtaacgtgcatataaaagattccatcttggtatatctccgaaagagtcataaaaatctatgtttttttaattcagttgtaaactacaaaacttctttttaaagaaatgtatgtacatacaaattatattttattccataactctctaacttttgttcacgatagtctgatattgaaaaaatataatatttggtacgacatcactttgtttttttataaagttttgtaattaaactataatattgtattttttttgtattattgaaattagtaataataaaatgtattattgaaaagcacaatttataattcaagtaatcaggactatgcgcccattataatttgaacattcagaaattataatattgtctaaaaatgaggtgagattcatagaaacagtacatattaaatggtatggaatgtatagtataaatgatttttataatagggaagaagcttctaagaaggggatatttgcaatctctagagtatgtgctaagagtgtaacattgctatatataggacaaaccaaaagaagctttatacaaaagataagggaacttaataaggagtggcctttcgatgagagcgaattaaagattacattaggaataatagaatttcctagtggtgaaatttactctgaaaagaaggtaaaagagataaaatcccttttgattttacgacataccccattagaaaacgaaacatctttattatactatagagggaaatttaatttaaaaattataaataagggaagaagaggtttaattgttaaaaagctttctacaggagatctaatatggacataattggaatcacctttgaataaaattgaaagtttcttaagtgcagaagcttatctatttttaatgtattaaactattttgaataacatatgtcagatacttgaaaaaacacaaattttattatgatatgaaatcctgtatggaaagtgtagtttatttctattgtttaataaaaatattaagaattttagggataatacataaagagtagaggagaaagtaaacacggaggtttgaagaatgggacaagtaagcagatttcaagaaaaacaacagaatcgtcgtcaaaaggcaatttttaatattgcatttactttggtattagtgacagttggtatagtgacataccaattgtttaccccttctaatacatcaacgaaagcaattgctcaagaaaagaaagtaacaaagatagaagagaagaaaactgaagataaagaaacagcaaagatagaagagaagaaaactgaagataaagaaacagcaaagatagaagagaagaaaactgaagataaagaaacagcaaagatagaagagaagaaaactgaagataaagaaacagcaaagatagaagagaagaaaactgaagataaagaaacagcaaagatagaagagaagaaaactgaagataaagaggcagcacagctagaagagaaatcaaaaacagaaaaatcggtaaaaacgaacggaactgaaaataatgaggaagaaaaaacggcatctcaagaaaagggttctcaaactaatccttcttggaagccaattggtaccgagcaaggagcaaaacctgaaatgaaatttaaagaaggaacagtagattggagtgagatgaaaaaagcaatttcttatgctgttgatgttccagagagccaattgattttcgattttattgggaataatggtaataataaagcctacggtaatgtacgagataagcaaaataataaaaaatataaggttaatattgattgggtagaaaatcaggggtggaaaccagtatctgtacaagtggtaagataaataatagaaatgtaatgatgtaaatcagctgtccatatggacagctgattattttttttgcttagcgtatttttttgaaaatgctggtggtacctcgttgagaaacatgaattaaatctatattttgttttatttacctcactactttatccataacttctttatatttataatagtaattagtttcaaataaatagttgtagggaagaaaatgttccttgtaagtagtaagcatcctttgcaattttactttataattatttataaaaaagaaaagacaccctaaggtgccttccttcgacttgaaccatcttaattttaataatatattggactcccatccaaatattattttaccatgttaaattgttttattcattgagaaatatagtttcattttatatttaaaagaattctataggctagaaccacctattaattagggggaactgacatgttaagctaatattatagtacttctagaacggaaatttttttaaatatgtatacgagccacataccaaaaaaaagacactctcaagagtgcctctccttagcagccgaatccgccgccccaacagctagcgccaacgatgattaataagatgaagagcacaacaagtaaggcaaatccgccgccgaaaccacagcctccaccacaactaccgccatagcccatattaactcctccttccataaagaccatttattaatggatttaatttaatttatgtttttaaggatgaatggagcaggtccttaaaaaaataaaaggattttagaagttaaaaagagttgacgaccttatttttgtcaccggtatccccccttctacatattgtattttattctgtgtattgggggaaggaggatcttatggctaattctgagatgattttacgtttacttacggatttaaagattgaacaacaattgttgaaagaacagttagagaaaatgcaaacagctgtgactattcttgaagaaaaatcagtgacgcttaaagaaaaaccagcgacgcttaaagaaaaaacaatgactcctgaagaaaaaccatctgttacaaagcaaagagctttttctggacgcccaacatcctttcgtgattggagagcatctagtcaaaaaaattagggaatgttatgtgaaatgataaatgaaaaagtacagtctgctgtagaaaagactgtacttttttatgttagtagagaatgttaagggagacgtatttattttgcctattccaattccacttttaattggagctctttatctaacttatcattattaaattttaaagttaatcctcgcgtgtttttcggtacatcgaatacaatgtttccgtccgaatgttcatcagggttaacaataccaaatttaaatgtagacgtatttgcagctttaagtacggattgatattcattagaaatgtgatattctcttccaaatccatcaattaatttaaagttgttaatatctagtgtaatgggttcttctttacgattataaactgcgatgtctaatactttaaagacaccttgtgctttaacttctccagtccctataacatctaatgactcggcagatcccattgacatgtatacatcagaggaatctacattggtaggaagttctttttgcgaatccttgctgctaagtttgtcattctctgtttttttagaagtcgcctgctcatttttcgcaggcgcatcatgtgaaccgcaagctgatactccaaacaagaatgtgctacataataatgaggctaataactttttgttcatcgtttcttccttccaaaatagaagcactttaatgagtgctatatatttgtctttatatgtattacattttatatcttattatattaattttggaaggaaaaggggaaatattgtgcatttctctgattcgagttatttatccgtctaaaagttgaaattaaaatgagccccataaatgataaaccattccactaacaaaaaacactaatcctaaaaataaaacaattaaagcaagtattccatttttattatgttccataaaattagctcctttttcatttacttacatacaaaaagcctttagtcgtaatgatggctaaaggctttggtcattatacttttgtggtcaatattactttatttagctgtatctgagtaatattcctcagcacgaaactctttaataagtgatatttcatttgtatctggattaaacttaaatattttaatttgatttgattcgtctttgtatgcaaatgtattctcaccaacttgggtcatattgctggtgtttaagataggatcgctaccgtgatcagtaatttctacagttttctcccggtcccaaaacgcaatgacaataatcaaaatgataagacatacccgtataaaacgtaattctcttgcaacaggatgttccatctgttagtctcctttactgtttgatagagtctgtttataaaagagataattcctaggaatataaataaaaaagacaccgtaaagtgtcttttttattttagttatgcgcattacttaataagacgctagttcctcagtctggctatgagtaactatgtagggtaattccattataacattttaaccagtaatgggtctatatggaattttgttgattttctttttgattattcagaatgacttgccaagtatttggatgaggaaagcagtgagacagaagcgactaaacatgttttagaagagtgtcttcttttttgtatcattgtgagtaaagtgtagagttatatttccctttacacaaacataacggtataatatagttaagttaagtaaacttaactattaagcaaaacgaaataaaagcatggaggatgctatgactagaacgtataaagaagtaattaatgaaatgaatcgagcctatacggaactctatattttactatttcaagatttaaaggatgagttcggtcttactgggcagcaagagagcatgttatttcatattcatttaaatgaaaacacgacagcaaataacattgcgagtacgtttaatataacgaaaagtgctgtgagccaagttttatcgaaattggaaaagcaacagatgatttcgaaacaagtgaatcctaacaataaaagggagtatttccttacgatcggtccaaacggtagtaaatatatcgaaagattgtctgagttagatgatgtattgatcgagaaatatttctcgaaaattgatattggagcgttgcagcaaatgactgatacgttaacgaaaataaataaagtgatattggaagaaaagcagaaggatcttgagtctaatgagtaagaatgaagatgaagcaattagtagaaaggaggagaagcgtgtgatgagttacataccaaatatgattacgatagcaaattttgtgtgtgggcttttggctattcacgctgttttcgttcacgatatgcatggtgcagttatgttcattattacaggtatggtatttgatctgtttgatggtatggtcgctcggaaactagatgctgcttcggaaataggcggagagttagactcatttgcggatttagtgaccttcggtgtggcaccatctattcttgcctatagtgtcgctttaaaagatttgcagtttatcgggatgatatgtgcgctcgcttatagtatttgcggaatgctgcggcttgctagatttaacacgcaacaaagcaaactcccaacattcatcggaatgcccattccatttgcggcaatgtgtctcctcattttatgcctcctaaataacccagtttccgtggcatttggcacatgcgtactcgcttatttaatggtgagtaaaatcaaattccctcattttaaaaaagatatatcggaaagcttgaagtccgaaagatgggattaataggaaagataaggagcataatatgattcgtatggcattaagatcattcaacatacaaatatattgtttattaggcgtgatgttattgggatggttgctgacaccttttccagcccagtttgtagggataagcatcggccttttagtgagtatgtactgcgcctggattttaggaaggcgtatcgaaaagttcggaaatagcatcgtaaaaaaagaaaaagcaccaatgctcggcatgatgaatcggtttgcagccgccatactcggtgcgattattatgtatgaaattgaacaccgtgagtacatgtggacatttgcagctggaattatgggtgggtatttcctgattattattaatttgggctattacagtatgagggatgagaagaaataaagtgctgtgtaaataactaatttggatgatttgaatgtaaaagcctcaaaactttcttttctagagagctttttattacaaagaaaagacacccatatatgaagtgcaccccaattgttagacacataactaacaattggaggtgcattttttaataccctagaggctgcctaatgaaacgacctgtctaactttcgggggtcacttcaatataattagatggcttttgtatgttactctatcgtttcaacttcacgtggatttttcatctcttccacatacacaactctaaatccgtgatcttctaaatcttccaataatgtctctaattcaccgtcgttaaactcttctcctaatgtaaacataattctacgaactaataaggcatcattatcaaaagtcatcaaactttgaataccagtgtatttctttaaaactgtcgataacttttggattgctccattatagtcttgcgttccaatcatgacagagtatttactagagtgaacgccccatgcatcctctaataactcaaaaacttttttatgcgttaaaattccaaggaaaacccctttttcatcaactactgataaataaggcaatttttttattgtaaaaaatactttaaagaaagatgaatcttctctcacaaatccttctttatcgtttaataattgtattacactctcatcaagtgatcctttatattctaaaatatctactttatatatattccctaaaaatttctcttttttttcatctaaaactggtacacaacgataccccgttttatttaaatgctctaacgcttcccctatcgtaatcgaacttgagcacagtaaaacttcccttttcggcacgtaattccctttaatcctcataaaaagcctccttatgttaaaatactttctgtgccataactatattatattttcagaaaaaaataaataatttattttatttttctgaaaattattcattttcttgtcataatttattcatgaatccttcacttgtatatttttgctatcaaatcttctctctgaattactaaatgaaaaatatattgtaacttctttcaaaaaaagctaaaataagaataagaattttctgaatattctaagagtaggtggttatatgtccttattacgctcacatatatgtaaatttataattggtattattgttatttttgccataagtcctattccagctctttttattacacacaattattcttatcaaaatgaatttattagcatttttcaaaacttcgcacagctttcttctatatcaattccaaaggttgattggatgcatgaatctatctttttctcagcaaaccaaatgatacatacttctaatcattcaacaccattattcccttacatatgggaaatatattttatatcgattgttcgttttacttttacccttgcgatcggatttttcataagtttgggtatcggccatttatttttcaaagtacctaattcgtttaaaaagtttactactgtattgaaatggattccttactctttttgcactgtagtattacaatgttcagtcttattactacttctatacatcgcacaatttataaaccttccttactactcatcatttatcatcgtatgtagtacttccatgattatcgttatgcaagcagtaaaaaaatggattcctttcttaaaaaacacaaatgaatatgaaataaaacatgattcttttcttgtggatacattgtttttggcgcttacttcgaatcataaatcaattttaggttccattattctttcattcgtttttatggaatgcgtttttcatgcaaatggactgttacaatttatcgttcaatttggcggaaattcacccataattgttacaatcggcttattactactctatatcccatatagcatactttctttccttcaaacactatggaccacaaactactccaaacaacagtcatacactttgacgagaagtgttccaaaaccttaatttaaaataaccctctataatctaaaagtagggggttattccttttgtatagcggacaaaataacagcaaattcaaaaactattacagaaacataccaatatttacccttttcctttgactattcttttcatttggatttattataaaagtataacataattgcaggaggtgacatctttattccaaaccttggaatggagaacacgcttggacatattaaatatttttctcatctttgtacttattcttatttctggctttttcgttgcatcagaattcgctgttgtaaaagtacgaaaaagtcgaattgaccaacttgcaaatgaaggtaataaacaagctttagctgcaagaagcgtcctatctaatttagatgtttatttatcagcttgtcagctcggaattacaatcacttctttagggcttggttggcttggtgaaccgactgtggaacatatactacgaccgctctttgaaaaaattaatattactggaacaatggctaacactttatcttttgttattgcttttagtgttattacatttttccacgttgtattaggtgaattagttccaaagtctttcgcaattcaaaaagcagaagcgatcacactcaaatttgcaagaccgcttattttatttgataaaattatgtacccattcatttggctactcaatagtacagctatatttttcacaaaattactcggattagaacctgcgaaagaaagtgaacttgctcattctgaagaggaattgcgactcattttaggtgaaagttttaaaagcggtgaaataaaccaaaccgaatataaatatgtaaataacatttttgaatttgatgatcgagttgcaaaagaaattatggttcctcgtaccgaaatgatttgcttatctactgaaaatacgttagaagaaaatatggatatcgtcgctactgaaaaatatacacgctatccaattatcgaaaaagataaagatgatatcattgggatgatcaatacgaaagaagtattccatgatcaaacgaaaggtatttataagccacttgaatcttatatacatcctgttctaactgtatttgaaacagttccaattcgtaaaacgttagtccatcttcaaaaaaatcgcgttcagatggcaatcgttatggatgaatatggtggtactgccggacttttaacgatggaagatattcttgaagaaatcattggagaaattcaagatgaattcgatgcggatgaatcacctatgattgaaaagcgtacacctaagcttactgttttagatggaaaggtgcttatttctgaagtaaatgatatgtttggcctacatattgatgatagtgatttagatacaatcggaggatggcttctttctcaagcagttgacttaaatattgaagctggctattccattgaatatgctggttttcaatttaaagtattagaacttgatggccatcaagtcaaaaaagttgctgtacataaactagatattaaaaaggagctataaagtgactgttttattaacaatttgtatcattgcctgtttcgttgtttcatttctcgcctttatttatccaattatccctggcatactagctgtctgggctggatatttgatttaccatttcggtataaatggaggcgaattaacaacttctttttggattattcaagtcatttttactcttttcattttcgttgctgattttattgcaaatggatatttcttaaaaaaatacggtagttctaaatggggcgaacgtgtcggaatgatttctatcattgtcggatcgttcttcttcccaccattcggacttattatcataccgttcttatcagtatttataacagaactagtgcataaaaaagcgccaaaagatgcctttctagttggagtcgctactgtagttggttttttaagcagtacagtagcgaaagcaattctccaaatcattatgattatcatcttcttgtgttatatcatcttttaaccatcccgacttcgggatggttttttaatatgcaatacctactcgactattttcatatatgtttttcttacatagatcccatgcaaagtgtgctgtatcacccactgtaatttttgatccaccctctggcaatatatctttttcagttcgatatacctctgtcgcctcaccatctattaaatgtgtcggacaaacaactgtccaacataaattattactattacttagtactttatatgcagccaaatgatcttccgctgccgttgtcgttttccttttggattccgttgattgaaaacgatataaatttagatttgttcttgcttgtaaaataccagctgttcctattgttatgattctacgaaccccttcttcttccatttgcttaatgatttgtggcatactcttccctaatgttccattttgatccgttccaagtgcactaattactatatcgcttccttctatcactttctttatatcattttcgttcaatacattaccttctatcactcgtagcctttcatgttgtatttctattctatttaaatcacgcgctaatgcagtcacttcagctgaatcctttaatgctaaattaattatgtttgaacctactcgtcctgttgctcccaatatacatactttcatttgttttccccctctttcattctctttctatttttcaataatctcaataaatttacaacaaaaaagcttcctcatatatgagaggaagctttattattactttatttcttttctttagaatcagtagacttctcggttccgcttgtttctttatcctttttatcctcttgttgtgttgttgtgtcgtcttctttcttcttgtcctcacctttactacaacctaccattaataaagaacttgcaagtgccatagcagttaatgatttaacccatttgttcatttgcgtttcctccttgtgatagaatatgtacaacctcatattactctctatttttaaaggagagattgaaaaatagtaaatatacggtaaatttttgtaaatcttctgataacaaatcctaattttaatttatatatttcatttccaatcgatacacaataaaactagttttttctctcaatggacgtaaaaaaactaaggcgcataccatttcgccttagtttctcatgcaaacttttcattttcatatagatgtgtaatcttatattccttcttcataacatattgccacacactataagcgtaacggttcattttcaggaaacaattttccaaaaatgagcgaaactctggattagcaacttccactgcaacttgagcaaactttaaagctaatcgtttcaagtgcgcaatataactggttgcaatatgaatatcccctgtatatttactaactgtttccttttccatttcatgcaaatcaaactccgttgtttcacaggttatatgttgcacattctctccttcttgaaaatttacttgttcattatatgcttgtaacatatatggtaaatggtgctgtaatagattttttaattcttcgtctctgacctttccagcatactctccaaccttgtatattagtatataactatatctcattaattctttcatacagtccattaaagcgcctcccttctctttcgtccatatactataaatatgatgctaaaacattcgctattcttgctaaaaaccaatcccatctactaattttctcaaaatcttcttcagaaaatcgttttgatttatgaaagtctacctgtaatcgactccatacttcatcaacaacggttttatcatatatgatacagttagactcacaatttaaataaaaacttctattatcaaaattcgctgtcccaatatcaacaatttctccatcaataattgttactttcccatgaaaaaatccatttcgatattgataaatctccgctccagcatgtaacatatctttcaaatatggataggcagcttgttttaacaatatggcatcacttttaaatggcacgagaatttttacattaacaccacgatttaatgcagcttttaactctttcaccatttctttacttggtacaaaatatggtgtagcgataattaaagactttttagcctgctttaatagtgctccatatttttcccataagccttttccatttgaaaataaatattgatatttcacattccctaatgtaggtatactttcatgtataggcattttttctcctgtatcttctttccaatcttcggcgaactttctttccatatccgctgcaccctcaccatggatgcgcacgtgataatcacgccatggcccaaactttggattttgtccaaggtactcctttccgatattaaagccaccgacgtatgatacctttccatctatcgtaacaatacgtctatgatttcgttgatgcaaagaatagaacatatttttcagtttcggttttttactaaatgtaaacttcacaccgttttcttttaatcggctaattacctttttcttcagcttatatccgcctacccgatcgactgacaatttcacttctactccgctagatgcttttttctctaataactgtaaaaactcttggcttatttcatcttttcctacaatataaaaatggatatatatatacttttctgcatcgtttatatcgtcaaataattttctatataactcttcaccgttcgtatatagttgaaattcacctaatcgaacttgtcctaattcatattcactagccatttccttccccatttccacatcgatgttcatccaaatgaatacacctattaaacaaaggattatagcgaaaaagtgcttcatggataaattcctttctccacttactgttatttctatatcttcccttttttattacattatcattcaagaaaatatgtcattgcatgatatatgtccatatcaaacaatagctcatttgcatattgtatgttgtatcttaaaataaaaggaggaaataacaatgggcttcgcacatggtaatggatttgcgctattagtcgtattatttatcctcttaatcatcgtcggtgctgcttgcttctgctaagtagctactgtcatatgatatgtggatgaaaaaactataaaagcggacacctattttaggtgtccgcttttcattttaaaaccatttccgactgctatagtaacttaaatggctaaatattcatctcaaaaggttaacaatgtggctactttcttactctctgccttacgtatatgacgctgttctgcacgtaacacagcaatacgatgtaattctttctcttcttcggtttcagggataacacgcggtactggaactggattattttccttactaagtgccacaaaagtaacgaatgacgttgccgctatacgcttctcacctgaaattaaatcttcagccactaccttcacaaacacttccatcgaagttcttcccgtccaaattacgaaagattcataactaacacaatctgaagaacgaacaggatgtaagaaatcgacccagtccatagatgctgtgacacattcctttcttgaatgtctggatgctgaaatagaagcaaccatatccatctccgctaatatcttcccaccaaatagcgtgttatgatcatttaaatccgttgggaagactcggctcgttttgaacacccttgactcattggctgttttcccctttacttctgtcattgttatcacccctttaatgatctatccctaatatttcaataatcactatactaaatgaactacacgtttaatattaacaacattcagaacttttagtccacaaaaaagaaccgattttatcaatcggctcctctaaatacatattgttctttcggctgttcaactttattccattttgttacttctaatacaggaatattcgcatgaaacggctgataaaactcagtagttatctctccttctacttgaatccagtcatcattattccactctacgccttctggttttttcactaacataccatacacaccagaatctgctacgcaatgtataataccgaaacggaataagaagtattgttcttttttagaagaatcatctctaaaaacaaaccctttaaaagataattttttcccagtaaactcgccaggataattataaattgtttccataccctttaggaagtcttcatctttcaaattaatattgtctttcgtaacaaactctttcttccctttttccattacaccgcggtatccttctttcccgtaataaatgctcgtatcaggtcttaggaattgtcttgtcataaatggatccttactttctgcttgtgcaacaggaaagtgaaagcccttcgctttaacaatatccgaatctagcgtcgcaattgggaaaaataaccctgagataattggaaaacaaaacaatgagtacgaaaatgcttttttccaccatgtattctcatcttttgaatgatcatgcccgcaatggctatgatcgcaactgcaatcatttttctctttttccttttggtgctctttttggaaaacgacgataatttgtataatcgttaagaaacctaaaataattgctgctgttgttgataaataggcatacttcatattgatatacttcgtaatgttaccggaaatatgcagttgcgcaattaatattgtaaaacctaataatatatatgctcgaaacataacctaccaccccatcgcataaatgagtagtgagcttgcataaacaacaagagtaactgtaactataacaacaattacaaatttcgttttaaatgtcgcaagcatcataaacatatttttaatatccaccatcggtccgtaaacgaggaacgcgacaagtgaagctgttgaaaacgtactttggaacgaagaagcgataaatgcatctgcctctgaacaaagtgataatatataagcaagtcccatcataacagctgatgaagaaaatgggccttgtccaatagcaagaagtgttgaagtttgtacaaacgtttgtaccgctgctgcaattaacgcacctagtactaaatattttcccattgagaagaattcctcaacagcgtgtgtacatacatcccacatttttttacgcagtggacgcttattattcacttctgggaagtgatcatctcttaattgatgttctttaaacataaaggataatataattccaacgataatggctacgataatcgctacaatagaacgataccataccatgtgcatactactcccaaaggcaacataagtagcaaataatacaactggattaataataggtccagttaacataaatgcaatccctgcgtatggtggaacgccttttccaattaatcgtcttacaatcggaacaattccacattcacaacctggaaacaacatgcctaaaaaagtagctaataaaacagacagaaatcggttcttcggcatccattttgccaccatatcttctgtcacaaacatttgaatgaatcctgaaataaatacaccaatgagcacaaacggaagtgcttcgattaatatggaaataaaaattgtattcatttgcaggaatgctttcggtaattgaaacaattccatgatgtatttcctccaacttttcattaacaatatgtaattttaaccccatttcattaattggacaaggtttatatgacatacataccctttatatacattacattgtacaagttatattctattcaaaatttgagatttcatagcaaaaaagctgctctagcgtagttatataactatgctagagcagctttcttatcgttaaaagtaacgtttcttccaaaaaacaaaagctaacgtgaaagatagtgttacacatatgatgagtacaattacaaaaccgtgggcttctccttcaaacggaacctttacgttcattccaaagaaactagaaaccatcgtcggtaaagataaaatgatcgtaattgacgttaacagtttcataacactatttaaattatttgatataacggagctaaaagtattcatcattccacttaaaatatgactatatatttccgccatttcaatagcctgtttattttcaattaatacatcttctaataaatcttgatcgtcttcatacatttttaaaaatgtactattacgcattaacttttgaattacaattttattagcctttaatgacgttgtaaagtatactaagcttttctcaaggcctaataatgtgaaaatctctttatttttcattgactgatttaattgatgctctaaatcaattgtttttcgatttatttgctttaagtatcttaaataataagtagaaatcgtatataagagctgaagtgcaaagcgcgtcttcttaaacgtataaaattctttaatacgttgattaataaaacgttcaaaaattggattctcttctaagcagattgtaacaaaacaatccggcatcacaatcatacctattggaatcgtgtcataaatcgaatttccttcttcgtcatgtctaactgtcggaatatccacgataattaaagtattattgtcttccttttcaatacgagagcgttcttcatcatccaaagggtctttaatgaaatctaagtctacatttaaagtttgtactagatattgaatttcttcttctgttggatgaagtacattaatccagcaccccttttgcatttcctcaatctcttgtagttttccgtttcggtctgttaaatatatatttaacatactatcaccccgattctttttacatgtaggaatctacctctcttaaatcacagtttttaaaccgccattctcagcatatgaaacatacgtttaaatttcaatagaaaaattattttgaaaacgtttttataagaaaaatattataaagtgaaactttaatcagtgggagcttcatcccccccactgattttcaaccctcaccaatcgggcttttacggactgcccgcccccaaccaaacttcttttctttcgctgaattttgagatgaggatcttactgcccgttagagcgggataaacatagaaaaagacagagtgctctctgccttaaaagcttatgttgcctttataacatatttagaaagcatccacaagttaaacccgactgaaatcgtatagcccgcgtatgttgaaatgataaaacttacataatcgaaatacggaagcaatacaatatttaaaactatcttcacaataattccaatcactagtcctagcaccgtcttctgctgttgattgattccttgtagcatagcagccgttactgtaaaaagagaaaatagtatgcaagcaggagcataatactgtaaaatgattctccccatctctggatcatttccagcaccaaataaaagggtatatacaggcttggctaacaccatcattccaattgccgccggtaccgtaatcgctactactaatacatttgttctcgtaaaatgtttgtacaatagcttcgtatttcctgctgtataagctttcgtcatctctggtacgagagacatactaaaagctgtcgcaacggataccgggataagcacaaccatttgaacaaggccaattatcgcattaattttttccgcttcgccttgcatataccctatctgtataagtagtttattaattgtaaatgtatcaatcgtctgatacaacggaattgctaagcctactacaacaaaaggaatagaatatgtaaagagctccttataaagtgagaaaaaagatttcgttgtttgtggtatacttgccatttcttttttctttaagtgccttctccttctcatataatacgcacttaaaacagttaatccacctacagctcccataaaggcaccgaacgttgaaataccaactgctagtgaaacagaagcttttaaaacatataaaacgacaaagcttcctattaaaatggttaaaacacgaaaaaattgctctacaactacacttaatgcagaaggccccatcgattggaatccttgaaagaagccccttaataaactcattactggcacaagtattaacgcaaaacttacaattcgaatattagtagtaaccgctcctacactattccccgtttgatcattcccatcgatgacaagtttagctaaatgcggagctagcatatataacgtaaaacacgaaatgactcccattataaacataaacacgattccacttttcaacactctcttaaccgtatgataatcattcagttgatcatattttgataccatctttgaaacagctagcggtaatcccattgttgctatgctgagcatgatggtataaggacgatatgcatatgtgtatagaacgtaaccactcgtaccgaccatcgctgtaaatggtataacatatataaaccctaacatttttgatatcatcgttgccatcgttaaaaatatcgttccacgtataaacggtgaccctttcatcacattcctccgctacgctttattattacacattatggacaactccttttctttagaaccgaaacaaataaaaaagccaatgaaaaatcattgactttaacgcgctgcttttttctttttgaaatactttaaaccaaagtatagagcaataaaaagaacagctcctataattatgtaatgtgtgtaatcagatgcatactctttaatttgtcgccaattcccaccaagtttttcacctaagtatataaatagaattgaccatggaatgatcgctacaaccgtataaagtgtaaatagttttaatggcatcttagctagtcctgctggaatagagatcgcatgacgtactactgggataaagcgcgcagaaaatattacgcctgctccataacgcttaaaccaaccttccgctatgtctaaatgatgtttattaataagtagatatttcccatatttctctacaaccggacgccctccgtagtatccaagccagtataaaaagatttgcgctaaagtaccaccaatcgttccggcgataactgcacccacaaaactaattttaccattcgctactaaaaagccagcatacgaaagtacaatttcactcgggattacttcaatcattaaagcaagagctactccaaagtaacctaagcttgcaaaaaattgcaataactgatctattatgtttgctaacatgttcttttttatctccttttttcttcacataccatcccattattacataaaggctgcaatctgccaatatcttcattttaacaatatgtacaattcaagcaggattaatctattaatttctctttctgcgggtctttcatgtaggcaaacatctctttaatttggtcttctgtatttctagcaattgataaattaggcaattcattttcaccaaaaaactccacctcttctgtttcaatgctagttttcttttctccaccaataatctcacatccaatgaaaatcttatatacatgcgtcgccgatggagatggttgatgtttttctttatcaaatatagctagtaacttaaaatgatctacctcataaccagtctcttcgaaaacttcttttgctgcaacttcggttggcgtataaccgacatcagcccatccacctggcaatgcccatttcccatcgcttttttctttcacaaataataacttttcattttgaaaaacaacagctcttatatcaactttaggtgtttgatagcctgtctcacttgcaaataatttctctacgacttcccaatctgttttcgtgtaatgtgacatcattgaaatagaaatatctcgtaattgctggaaacgctcaatatcatacacatccttagaatacgttaaacccgcttgagctatagattgtatttgttttacccaatcaatccatttaatcgtcatatatccgcatccccattctctatcaaatatattacttcattttcattgatacatctttattatacaaaaaaaaagagattgataacgtttcaatctctttcaaaattaatccaattcatgtaagtggtcttgtatatactttcttctcttatttatatattcataaatcatatcagcctcttgatcaaatgtttctaatttttctttcatgtatggatcttgtagtaaatatggacgaatcaattcacacaacccttctactttcggcctcataaacgaaactgtaaattgatcttctaatatttcttctaaaatacttcgatactgctttctaaatacaggtatgtctagcaatcttgcactcaacgtattatacccttgaatgcgaatatattcatgattaagcggtctcccttgtacatctcgcccccaagtcgcatcataatcccacggtataacttcaaataaatttgtttcatcgttatgatatagtgcatagttatgaacaaaaccatcaaagttttgcgtaaaaataactcctgctaaccatcgtaaatatttatctacatgtagaaacttcccaatttctttttcataggcttccctcgtcaaagtattcgcttgaaatacaaattcactcagttgttcttcactattttcattcgaatatttaaattcataacccgcaaagagctctgtcttaacatctttatctcgttcactcattaatgaaaaattcgcatcatcatctatcgcataataaatagaaccactcggtaatcctctattttttaaaaaattttcatcaaccgattctaactgtaagtacacaccttgaatttgaccattaatttttataaatacatgttgtgattttggcgaaagtacaccaatatcatgaaaaaaatctaaagataatttatttcttatgagagacggatccataaactccgaattcaaatgaaactctttcgcaccttgaaattttttaggcttataaaacataacatgataagactttttctcaaattcccgaatatgagctcctcggtatacgatatcaatatcatacttcttttttccataagttaattttgctggcactggactatctgaccaaatgtcctttttcaattccactaagtacattggatgaacaaaaaaatcatatgaaggcagcatgttttctcatcccttctcagttctcttcattcaatgtatgcgccttgtcttgtccatacatccgcaatcatctatttatataaaattacactcttgtcctgttcagaaagatgcctacatacatatcatgttaaggaaaaagaataccttttcactttaatacatgataaggaggatttctatgaaacgtgatattagaaaagctgtcgaagaaatcaaaagtgctgggatggaggatttcttacaccaagatccaagtacttttgaatgcgatgatgattgcactacaaaaatagagtgtaacgaagattgtaaatgcccaagaacaagatgtactcgcgtgaaacattgtacgttcgttacaaaatgtactcacgttaaaaagtggacatttgttacaaaatgtactcgtgttcgcgtgcaaaaatggacgttcgttacgaaagtaacgcgtagaaaagaatgcgttttagttacaaaacgtactcgtagaaagcattgtacattcgttacaaaatgtgtacgctttgaaaagaaattttactggactaaacgatgttactgtaaaaaatgcgaattcttccctaatggacacggtggctcttgcgacgattcgtgtgatgacggaaagaaatggaacgattgcaaagatggcagacataaattcccatcttgcaaaaataagaaattcgatcacttctggtataaaaaacgtaactgctagtttttataccacccaaaaaaaggccgttttgcggccttttttacatttattgaaagtgacttatatctgcaaattgtttcactttaccaataccctcttcaaattctattatgctcaaactggcactatgcataaatggatcatcccacacattttctatttcaattcccgcgaaatgccctacaagtaattttgctgctgccgcatgagacacaatcaatatattttgtcctttatgcatctctaaaagaagctgcatcccttcaattactctttcataaacggcctcaaaattttcgcctgatgttgactgaaaaagatgtggctcattccaaaacagatgtacttcttctggaaattgcttttctatatccgcgattgtttgtccttcccatatacccatgttgatttcatagaaatgctcatccgctataatgggtatatcacgttccccctttattaactctgccgtatgaagtgttctttcgctcggactactatagatcgcatggattggtaaatctttcattcgatttcctaattgtttcgcctgaactataccattttcagttaaagcagaatttttccgtccctgcattcgcttcgctacatcccactctgtttcaccatgccttgttacatatatagttgttttcatttcttactccccctcaccatgttggtcgtaattcccacggttcaactctccctacaatccactccgctcgtttactttcaatcctttttataattccatcagctatctcttgatgagtaagccaccttccatatgtatcttctaaaataaaacctaaaataattctatgataaatacatcgcgtactccctattttttgtgcaggcatacgtgatgctttactacctaaaatatgaaataaactctatgttttagacgacaaatctagttctttacaaatatttgatagtgcatgctttgcacttgtgtgtacccatgcaacaactaatgtgatcgggccatttttcttaattgtacttttaatagctagctttacatcttcatcattatgataatctaacgaaaggcatgtaatattttctggtgcagaactcattcgcttaacattttttaatttcacttcatctcgtccaataatagaaacataaaatcctttctcacaaagccacatagaaactttctttagcattcctgtcccaccaattacaagtgcatgcaaatgctatccctccctaataaaatgtcatatgaggtttctcatctctataataatttaaacggtcttgcagtgtccctgagtgaaactcaaatttatgaccgtcaggatcaacaaagtatatagattcgcaatctcttacatcacgttctcttccttgtaaaatatgaacatcattttcttctaatcgctgtattagacatttaaagtcttcttgttcaacagaaaatgcaatgtgcgtataagattgatgaatctcatttctcggaatatgcgtctcttcattaagcgctatccatactccacatatgttaaaataagctaattttcttcctttaactaataattctccttctaatactttttcataaaacataatagagttttctaaattagataccgaaaaacaaatatgattgattcctcttaacaactataattcctccttatacaaataaaagatgagcgaaaattcactcatcttttattatactatttttttgtaatatatgcccatttataactgaagtccccgccaaacgtatggttagcaatgccttttacaaatggcttctctaaataagctgtactttgttggtacgtaggagaaattgctgcgtcttgaccaattaagattttttcagcttccgcaagtgcattccagcgtgctttatcatcttttaatagctctccttttgatttcgctactaaatcatcatacttcggattagaataatccatttcattaaatgagcttccagtaacaaacatatcaatataagtcattggatccggataatcagggctccatgcagataatgagaattcatattggaatttcttttctaaatctagcttctgcttgtatggttgctgtttcaaattcactttaataccaggcaagtttttctctagttcttccttaataaagtcgcctacttttttacggctaccgttatcatcgtttagtaattcaaccgtaattgtatcttgaccaagctctttcttcgcttcttcccataatttttttgctttctctgcgttatctttactatcacggaagtttttatttacagagcggaaatcttttccatccggacctgtcgtgaatttttcaggtactaagaaatatgctggcaatgaaccgtcatttaaaatgacatcagcaattccttttttatcgtatgctaaatcaatcgcttcacgtactttttggtttttaaatgttgcatttttttggttaaaacgtaagaaatatatgcgcgggtctaacttcgttttaaattcatctggtttattctttttatatttatcaacaaattcagaagttaaaataactcgatctgcttgatcactatcatataaatttactcccgtgcttgtttccttcacaatacttacattaatttcgtctaactttacagtatctttatcccaataattaggatttttctttaactgataattttgttcatgtttccattgactcattgtaaatggtccattatatactaatttatctgcttctaatccgtatttatctccttgctctttcacatatttttcatttaatgggaaaaatatagggaacgacgtaagctcaagaaaataaggtgctggttgctctaattctactaccaacgttttatcatccttcgctttaacacccagttgatctaatggtaattctcctttatttactttctgtgcatttttcacatcaaataaaatgaatgcatattctgccgctgttgctttatctaatgtacgttgccatgcatatacaaaatcttgtgctcgaactggatcaccatttgaccatttcgcatcacgtaattcaaatgtatatgtctttttatcttcactaatcttcacatcttttgccatacctggtgttggtttattatctttatctagacgatataaaccttccattgcatttacaaatacacggaaagatacagaatccgttgatttagatgtatccattgaaggaatttcagctgtttctagcaaatttaaaacttgtttatcggccattcccttattcgattctttcttcgttgtcgaagccttctcaccattcccacaccctgcaaccaatacactcgtcgttaacgcaagtgcagcaattgttgttgtctttctcttcattcttccttcccccaatctatatgtataagttaaatcctatataatatattttattatacaaaagattctgattattttaaatatttattttaacaaacatagaaaaaagcgatcggaaatttctttccagccgctttcttgaatagcatttacttgtaatccatcctctatatcaaatggattttgaactttaaatatttcttccattagcttcaaaaactcttcttcagttttagattcaccattaaccataaatgagtatggttccacttcacctaatttataatcgacaacaaattgaatcttcaccttttgtcttggcgttccggtgttatatccttggaattctactaattctaacccttccgttccacgataatatatccaacctgaattttgaaaataattttcgaaagattcacctattgaaaagaaaggatattcataaagcgagcttgtacgaaccttttgaataacgtctcgatcagtcggaaaaaagaaatgactaaaaaatatgctagcaactgctaaaatagtaacaattgtcgctcccattttgctcgttccgccgctatcattgattagatagttttcaactgatttatcttttatttctcttgcttttattcggtatatacgtctttccgcaaattgatagtacaatccatttgcaaaaatccccattccaaacagaataaaaatgagtaataaaaacgtaagaggcaccatattaatgattggcaacgctacattaaatcccatataatacgaaaatgcatcacacgctactaataacaacataaataaagcagctggtacataatacttacgatatcctagccagcctatattgaaaatagcagcccaaccattccagctccacctagcaatccgcttattctcaagctcccatttccttttgtaatacggatattgtctccctacatatacttctagttctttatctattaacgagctaccttcatcttgttcattatccaagtttcgctgacaacttgcacaatttaactgttcctcctcgcaaggttgcccacaatttatacatttcaaaacaatccctcttcccatccatacgtcatttcaaaataccttcgtgttttaataaccactctttcctccataaaccaccagcatatccaacaagctttccactcttccctattacacggtgacatggaacaattattgaaattggattccgactatttgcccctcctattgcccgtacagcttttgtatttccaactttctctgcaatatctaaatatgaagcacttacgccgtatggaatagtataaagtgcatcccatacatttttttgaaatgctgttccctccgcagacagcgggaccgtaaactcttttcttttccctttaaaatattcatctaactcatttatacattgttctatcatttcatttttattttcttcttgtcgttcatcaacaaatataacagacgtaattccttcttgattcgctgtaatttcaagcaaacctacttcgctttcataataagcctggtacatatgccatcctccaattcagttcatattagtcattgtaacacgaatatacaaaatttttcgtataagcgttttattagagaaacaaaaaagagaatgatacaatgtaagaaaattcaatctaggaggctattggatgaattccgaacttttttcaccttatacaattaaggacgttacattaaaaaaccggattgttatgtcacctatgtgcatgtattcatcggaaaacggggatggccaagtaacgaatttccatctcattcattatggaacaagagctgccggccaagttggtttagttatgattgaagcaacagccgtgttacctgaaggtcgaatttcaaataaagacttaggcatttgggataacagtttaattgaaggcttacataaaacgactacttttatacatgataatggtgcaaaagctgccattcaactcgctcacgccggaagaaaagcagaactagaaacagatgcgttagctccttcagccattccatttaatgaaacaatgaaaatgccaatagaaatgagcaaacaccaaattaaagatactgtattagcttttcagcaagctgcagtacgatcaaaacaagctggatttgatgttattgaaatacacggtgctcacggttatcttattaatgaatttctttctccgctttccaataagcggactgatgaatatggtggttcacctgaaaaccgctatcgtttcttacgcgaaatcatcgactctgtaaatgaagtttgggacggaccgttatttgtccgtatttcagcaaatgattatcatcctgacgggctaacggttcaagattacgttcagtatacaaagtggatgaaagaacagggaatagatttaatcgattgtagttctggcgcagttgtaccagcacatattgatgtgtatcctggttatcaagtacaatatgccaaacatattaaagagcatgctaacattgcaactggtgcagttggattaattacgaccggagtacaagcagagcaaattttaaataataacgaagcagatttaatttttatcggacgtgaattacttcgcaatccgtattttccaagaatagcggccaatgaacttggctttgaattgcaagaacctcaccaatataagcgagcaccaggaaaaattcatacgaataaataaaaccgagaagtcattcttctcggttttatttattctatcgttgtaatttcatttgaattataagtatggatacccgattcttctcgcagcgcggttatatacatccctttcgccacatctttagctgaaattggtttatattttttgaaagctcctttaaagataaacggaataatacgagataacttttcagccattcgttcgccgaaacgaaattcttgtcgatttcctactaataatgatggtctaaaaatgtgaataccaccaatcactaacttttgcaattcttcttccatttttcctttcacttgtgaataaaagaagaatgatttaggattcgctcccatagaagacacgacaaggaaattttgtaccccttgtttttcagctaaacaagcagctcgtaacgtatattcataatctacttttttaaaatttgcttttgtttttgctttttttattgttgttcctaagcaactaaaaacatcatccacagcaaagaactctttatattcctctaataccgaaaaatcaacttgtttctgctgtaacttctcatgttgcaattgcattggctctcttacaaaaatagtaaccgaatcgtagtaatctgattcaagtaatagacgcgttatctcttgtccaactaaaccacttgcaccaagtattaacgctgttcgcttattcatatatgcatatacctcttattttacttttctctcctttagtaaaatacaacctttaggagtttcctgctcttattttaccacaagtaaaacactatgcgtacgcatagtgctttactcactcttttttctcatctctctcttgtaatttcgttattgttgtagcgtccccatgcccatcaacttaaggatagaaactctacggttttccattaattgaaatgcccgttccgcctcctgggtttcctccggttccgttgtctgttcccgttccgcctcctgggtttcctccagtttcgttatctttccctgttccgcctcctgggtttcctccagttccgttatctgttcccgttccgcctcctgggtttcctccagttccgttatctttccctgttccgcctccttggcttccttcattattgcctgttgtgttttccatttttttgataataggcgttttagcattgtgtactaacggcattatgccatactgtgatttatgaaccacattttccaccttgctattttccgtttgtgttcctttatcttctttgttaggtttttctttttcaggactagtttcttttttatgagtcccactcaattcccactgccacattacaggagagaaaacatctatattgatgtttggatcttttaacttcacatgcagatcaatctttatatccccttcattacgaggagctattgtaatttctcctgcttcgctttgaagaaaatcacttgtacgatcctcaccatcaatatgtaagaatcctgtacttccatctagtttaaattcttctggaatctttatcttcaaaatttgcggagattccattttaattactttcgcagtatcactaaatgtaattccctctgtataaagtctatcctttacttctttaatagcgtttcctaaagatattttatttacaggatcataataaaaattattttctttattatatttttttgtaaattgaattacattttgcagttgtaatttcgttgtatctggcaaatcactttgaccgatttcttccatgtttaaactaggtaatttcgcaattaaattctcgatttgtttctttattcgagcatctggttgtttcattaatgtatttatgaagatttcttgctttccatcattcgacatagattgctttaacttcttaattaccgtctcttgaatatcactttctaactttcctgcaagttctgtatcatattcagatacttgtttttttacatctgctaaatatttttgaatcgctgcagcatcagttaaaatattcggttctttctctgaaaacgtaaattgatttgaaataattttattagcggattccaatgcacttaattgctttaaagcatcgcctgtattcatatcattcatatattgattgaattgatttgtgaaattattcgctaacaaattgttatcagtttgcattttttgaaagttattaaaaccatctaagtacgtactgttagatttattcccttcatctaacgcttgaccgaaaccttttaaaacatcctgaaatcctttgaaactattaacagaaacacctgtataatcttgtactgttttaaattgatttgtgtaatttgctaacggactatgtatatcttttttatacatagttgtttgaacgtttcctttttcaattattttacctatattatcttgtgcaccttgtagcttaccgataatactcgcaaaataaacgtcgattatttgcttattgaaatcttctaaaataacagaagctgtattttctgcctcagctttcaaatccttattcccagttgcatttactttgtagtttaacgttaatttctctggaatctctgaatcaatcgcaactgccttcctagaaaaatcatttggaataacaatcatcatattgtaattattatttttcaatccattttccgctaccccgcggctaactacgtaccattcttgtttcgtatttttatttacatttttaacaaattgatctccaaacgctattttattgccctcaaatacagtgccctgatcttcatttaccaacgcaactgtcatttttggtgtagtattctcattagctttcttaacattttgatttaatgctaaataggagacccctgttgatagtacaagagctaaaataataaacaacaagatgctccatttgaactttttcactacttatcactcctgcgactgcgagtctatctaatgaaagacttcgtatcttactctagttttaaagtaatttagccatacaacgtatggttgcatggctaaattatatatttctgtttatctgtcttattgtagaccgaaattacgagaaagatcttcgtcatgtctagcaacagcttctgcagttttattaagctgcatattaatttcttgtaatagctgtgcgaagttttgtacttttggctttaattgattgaactgttggtcaaaaccttcgaaagcacgaccttcccattctcctcttaattcattttgtaagttttgtagttgacgtaaaatgtcctcaatttgatttgcactttgtccatatcgagtcgctttcgatttaagctcctctggtgacatacgaatttgtcctgccattattaaatcccccttaaaattaaaaaatagtaaaattaaccaataatcaattctacaaattgattatatcaataatttaaaaatttctaaacaaaaaaatgatatttttccaaaatttctcttttactataataacgatatattgtataatactaatttatttgttttttaagcacactctataaatctactataaaataaaggcaaaccatctattttatacttattcgctttaaattccagcgataaagtagccactaaatcattattttctcttctctcattcagactattctactcacttcaaagtcataattacctgcctttcaacaaacccaaactcttcgtacatcttttttgcaaaattcccagtaaatacattcaacctaatttctgaatattcctcctttaattccttaataccagcttccatcagttcacgcgataatcctctcccgcgatattctgggaaaacgtacaattcatatataaatccaagtttttcacgagaaaaatagtctgtattttcccctattaatatccatcccattactttatttgcttctttaatgattaaataatacgctcctttttctacaatcggctttgtaatttcaatcgctttctctgtacttaattgacaatttcctctcgtcccttcaaaaagcgattgagccgtatattttaatatttcattggtatcttcttgattcgccttaattatcatttttcacaactccccttgaataataggcattactatcgcttgttcaagattctccgcttccataacaattgccgttaatccttgttctgtacttgtttcatgaagctctcccttctcccaaaacacagcttgtcccgcctctacctttatcttttttttatttgccccacatacatatcctgctccgtccacaataagaagcagttgagatacaactgcttcatgattaccgatgattccattctcgtgtaaatgcatagcaccgatatgtatattccctctatggtttactattttcgacatgatgaaattagattgaaatactgataggtgctttcctactttttcactaaaatcaaaaattttcattgctagtcctccttatacatataaaaccatccttactgtctgcatcatatgtccttcaaagtcttcttcaaattgctctaattcagcaaaacctttcgcttcataaaagcgttttcctttttcatttgctgcttctacatgtatgtacaatttacgtatcccatttaattccttaatccctctttgtaataaagcacttccaatcccttttccttgctgatctggtaacaaataaatcgcacctaattccgcttcattttgtagtctaacaggtgaaaagttcgcaaaccctattacttctccttcttcttccgcaacgaataaatgcgtatttttaagacgatatttcattttttcatcagaatatgcctcgtctaaaaaactgtcttgaatttctcttggaataatgccttcatatgtatcatgccaagctatttttgctactgattgtacagcatgaatgtcttcttgcttcatttctctaattatatatgtcatctcgatgtctccattctctttaaattatattctgctaatatactagaagaaacggcaaaaccattttcataattcaccttaattaattttaatttctcaattgaagctgttgcaaaatcaaactttccataaatatattccattacacttaaaaactgctttgtatgtaatctatttgcaattgtacaatgcggaacccattttcccggtacgtaatatgaattggggttgtcatgaaaagttttaaaataatcatgataagaataatgaagttttaacaattcatcggtaacggtcggcgctagaaagaccgttccattagtaggaaaaattccaacagaaagaaaagttactgcgtccatattttcttgaatagctacaaactcccctagtttctcagtatacaaatgaacatctaactcattataatccgcaatcgttatatgaggttctactccagctagttgatttgttccaattacatttgttaattcattttgcagttctgtaattttattagtaaacacacgatcaaatgtagcaataatagcgtacaatctttctcaccccttcgttacacatagcgcttcccattcttcacgaatcatgcccattcgaatagaatcatagtatgttccgttataataacgacactttcgcattctaccttctaagctcattcctattttctccgctactttcatcattcgttcattaccagaccaagtcgtgattcctactctaccaatctccattttttcaaatagcaaatctctatataatgtcaatgtttctgtaccgtatccaccattccagtatgttgggtcataaatcacaagccccatctctaaccaacgcgtcggtttgtattcccaataaaacccaactgtcccaatgatttgaccgttattttctataattaaattggatagcggttcttcttttaaacgagtttgcatcttttccttataggatgagtattcttgcattgaaaacggaaaatacggtgcatcccattttttccattctggattttcttctttaaacacgagattccataatgtttttatatctgattcttcaattgtacgaattgttactttatccccttttactattacgctattcataatttcctcctacactcctctttatttcatatataattataatattttttctgaaaaatcaaaacaaatatcatttattatattgtataattttgttataaggtacgaattattcatgtagaaagctggtgattcaatgaataaacgatttagtattgctttatttcttactattgttacgacaaatattattctctatttcttcttaccattaagtattgttacgaaatgggactttaatggaacgcctacatcaacaatggataaaaccacttttgtaatcgtaaatataattatatgttccttcttattctttgtatttttagctttatctaaagcagcgagtaaccagaaatttctccattggatcggcaacacaatgttactattcttattttttgtcgatattgtcatcgccctcatcgctcttggcttttcacttcctcttgatcatttcatatttttagcattagggcttttatttatattaataggttatttcagttccaaaattgatacgactaaatcaaccgtttcattagaatggaatgataagcaccttgaaaaaagagcttcaaatattagtagtatttcaatgatgatagcaggtatttttttagcgatacttccttttatcgtttctgctccctatagaggttatgctatactagcaattcttttaggaatgacgcttatcattctgccaagtacgatttatttacttattaaagacagcaagcaatctactcctttaaaaaaataggaggttatatccctcctatttcagcttaatgttttatttttcactttttctatctcaactaaaatccctttctctatccaaccctctacgccatcttttttaattaaatcatatcctgaacagctatcatcaatgagagaaacgatatctcccttcctaacgcttatttgcgcacaagaaatatcggttttcactgtatattcacctgacttaagttgtttcatatattcattttttacagtgagcacattattcgtttccttttgtttacatacggtgtaatcttgcatcttctcgataggctctatgtaataatacggatatgtcactccgccctgcatttctgaattcgcattaaaatccgctattacttcgtactctggaaaatagtctacatatgtataagaaaacgtatcgcccgtttgtttcctctgaataataaatacgtttaattgccctgcttctttaattgcatttcctccatcaattgcaataatttctttctccttatcaataactggattattagacggtgcttcttcagaatagttcacgacaggccaatgaccgactattacatacttatttgctttatgtgattgattgaaaaactccggcattgctatcgcatttttgcgctcagtttctttccaatctactctatcttctagaccggcatgcacaaaaatataatcttctgtttcaatcgctgttggcaactctgttagccaatatagttcttgtgaaaattcacttaacaatgcttctttcacttcacgaattgaagtgccctcatgaactgaaaaaaccaattgctctagccattcattaaaaattgaatgcttcctcgtacataaataattaataagaccaggattttcatttagaagagcatcaactaaaacttcacaattcccttcaacaacgtgaacctttgaattgttctttacaagattcataacgtagtttactacgcctacgctatctcgtcctttctcgcaaagatctccattaataattaaataatcttcatctttaaagttaactttatgtagtgcttcttttaaaagatttaattctccatgaatatcagatatgacaataactctagcatcattagggattgatagtttctttatttttttcaagtataagcgctccaatcatcctctttattaaattaaaacaattcgacaaaatacactatataaccttttcaagtacatataccataacttacaacctatttacggttcaataataacttaaaaaataagaagaagctgttcccaacttttgcaggacagcttcttcttattttttataattctttataaaaagaataactcaccttatcatacccttctctttcataaaaacgatgagcatcaattcttgaaaatgctgacgtgaggacgatagactcacatccgttttcctttccccagttctctatatacgaaagtaatactttcccatgtccttttgaacgatgtgcttctgctgttacaaggtcatatacgaaaacgtgtttcttattataaaagttcgtacaaatcgctacacctgcaaggctaacaacttcatcattctcattacgcagcgaaaatagtttataattttcttctttcatatttcgaaataaagagcttgtttcctcttttgaaagtttcattcgtaattgctgtaaaacaggtaatacttcatgtaattgctcttctgttactacttctttaacattcatttttaactctcctctaactatttatttaattttctaaatgttatatcattattatagaaagtaactgcccttcacttaagtgacagtttaagtgttttttataaggccagttttaaaggagagttttatatggattttactatcccattgcaattacaaagtaacacacctatttacttgcaaatttacgaatatataaaagctgaaattatacaagggactatttctgtcggcacacgtctaccctcacacagaaatttagcatcacaacttaatattagccgcattactgttgaatcagcttatcaacaattattagctgaaggttatgtagaaagtaaaccgaaacgtggtatttttgtagcaaatttcgatattgacgttatcccaaataaaaagccaaatgcagcaaagaagacgagcaatttgatagacgaaaaatttgaatatgattgtagccaaggacttattgatcaaaatgcatttccgattacaaattggaaacgagcattacaagaatccatacttacatacgaaaatgcactatttgccaaagaagaccctcaaggtgaattcgctcttcgagaacatatatcaacatatttatatcattctcgcggtgtccattcttcacctgatcaaattgtgattggcgccggaacgcagccacttctctggctactacttcaactgcttggccctacaaaagaatacggcattgaaaaccctggatttcaccgtatacacgcaatcattaaaagctgtgatagacaaattcatcccataccattggatgaaaaaggtattgatatttctagtttatacaatacaaattccaatgtcgcatacgttacaccatcacaccaatttccactcgggattattatgcctttatctagaagattagaattgttaaagtgggctaatggttgcagcggatacattattgaagatgactatgacggagagtttcgctacgctggtaagccgattccttctttacaaagtcttgattcaaatgaacgcgttatttatatgggaactttctcaaaatcttttttaccttctttacgaatgggatatgttgttttaccaccacaccttttaaaaacatatcaagaactgcatggaattttcaaacaaacagtcgctacaatacaacaacttgcttttgctaactttatacaaagcgggaattgggaacgtcaccttaatcggagtcgtacactatataaaagaaaacatcatgcgttagtaaaatccattatgaaagaaatgggggctaatgttcaaattcttggcgaacagtccggacttcatattgttttatgtgtccataacagtatgaatgaaaatgaactgattgaatccgctaaaaaacaaagcgttaaattatacccactttctccatatgatttcgtgaatgatttacgtaaggaatcatacgtattactcggctttggtagtattccagaaaataaaattgaaacgttggctagattattaaaagacgcttggtttcctagttgcaaggaaactttttaacagtggatttaacttgtaacatgttaacaattcaacaaaataaaaaagaaggctgttccaaaataactttttggacagccttcttctagttattcacctgacctagctttccttcccggacgtttcacaccagtcgtttctgttgaataggaagcttcgattatagcggctggatctacagagagaacgagatctttcattttcggataaatgaatcggtttgtaatgcaataaatgattctcttatgctcccctaaaaaaccaccttctccatgtagatacgtaacagatagttgcaattctttcataagtaaatcgcctatttctttattcttaccagaaataatcataacgctcttaccttgattaataccatctaatataaaatcaatcatcttcgtaacaatatagaaaattgctaatgagaacatcgcttgttcgattgaaaataaaatggcaacaaagatgaaaataactgcatttactgcaagtaaaaatgtactaatcggtacattaaagtgtttattcatccaaactgctaacatttccgaaccgtcaattgctccacccattttaacaacaatcccaacaccaattccaaacagtactccaccataaagtacaattaataactcagaagtcgtaattgctggaaatggttttaaataaattaatccgagtgttgtaactacattcgcataagatgtacggataaaaaatttctttcccattacttttgcagtaaataataaaattgggatattaattcctaagaacacaccataaagcggcaatcctgcgactttatttgccataatagcaatagccgttaccccgccatctactaatccattaggtgctaaaataagctctaatgaacctgctactataattgagccaattgttaataatacgtattcaaatactttcttcattcattacccccaaaacttatatattttcttagtattattttaacgtaattttactactaattcaaaggtatcgatttatatacacaaaagtttctcctttatcgctatttttatgtaacacatgtaacgcgtaatactaaaaacacacttacaaattaaaagtaagtgtgtttttaacatctatttaatctttacgtacggcttcatttttaatttgaatatttcctcaactgccctttgatatccaccggcatttctaagcgactctcccactttacgactattctccttaaacgtcacatcatccattactttctttacagtctcacgtaacaattcagaagttaactcgttgcgattaagtcttattcctgcccctacttcagtcaatcgttttgcaacgaatggctgatctcctgttaccggaattacaactaatggaacaccgtaatataacgcttcactcgaactattcataccaccatgtgtcacgaatacatcagcatgctgtaaaacttctaattgcgggacataattatacaacttaaagtttttcgggatattttcaaattgacttatatttatcttcttaccaacgactaatacgactgtcgcatcaacatctttaaacgcttcaaaacatttttcatacaaagcaggttgttcattaaaaactgttcccatagaaatgaaaatcactttttcattttttaaatcttcggtaggaaaactccccacttcttttcgagtagcaattgatggacctacaaatttatacgattcatcaaatacctctgaacgtggctgatattcttttgaagtatatacaatcgtaatatcaccaggatggttcataatatcatacatactattacatttcattccatactgcttattccatctttccattcccgctaaacaagattgatataatggatccatttcatctacttgtctcgcttcttgctcatcatgaaaattaatgtactgattaacagcaaacgttgtacaggatgaaacgcttggtaattgtaaaatattcgctataatacgtcctactggaaaatgattatcatatattaaataatcatatttttcctcttttgtttcttctacaatttgagtaacaatacgctctgatgcttcaatcatatgagatagcatcgtcaaagggctcccaccttcatttactcgttccataatattaatttgagagagaaaattctcaaacactcggaattccgcacctgttgcttcaaccttctttctataatcttcaatacaataagaaacaactgtttcccctcgctgaattaactcacttacaacagctaaagtcggattaatatgaccttccccaggaaaatttattacgagtacatttgccataacattctctcctatccaattaatataataaaattaacaattaattatattaattaatttaagtctattataaatgaatgcattctacttcttcatgcttttctcttcattttattattgagaaatattttctatagtctacattattgtgattcacaatcttataaatgaatgcttaattttacttttactcttcatagatttaaagatacgagtcttacattcaagtattaccaccattatttttagacaattcatacaaaaatagagaaatataatatttttaatgaattttcactataaatgtaagtatgctttcaatctttttatctttatcctcataacacatcatctgttatataatgaatttatagaatttacagaaaaataagcacatgcctttaaaagtggttacgaattatgtctattcctcacttagaagaatatagacagccttatcgttatttataccgactgttatctgtgcaaggtaatgtggaattaaaaaaatggttaagtcacccatcctatttttaaatacgaatgagagggaatatacaatggatattcagaaaaagcgttctgtaacagaaagtgaaatacagcaaatgaaggatttggcttatatttgtgggcaacaagacaatcttgattactcttcagatttacatatcaactttttaaaaaatcgaaatgaagattatataaacgattttcttctttataacggtactcaattaattggcgctttaaatatgtatgatttcgaaagaccaacaaagcttgaactaataggctttgtacatcctcattttagaaaacaacgcttcggaactatccttttacaaactgcaatgaaagaaatacaaaatagggagacagatgaagctcttcttattattaatggggattctatttctgggaatgaatttgtaaaacatatgaagttaccatatttatatagtgaatatagtatggagtgcaaaacaaacgaaattcaaaaaacaacagataataatatacagcttactcttgcaccttcagaatcacttcttgatcttattaaaatttctagtaaagcttttggtgattcagtagaaaatacgactacatggttacaaaaaatgatgaattcatcttcccatcaagtttacagtgcccttattgctgaaaaagtgataggaacaattacagtttctaaacaagagcaatctactacactatcaggattcgccgttcatccttcttatcaaggtaaaggatacggaaaagatattctttgtaatatagtacatacccttattacagaaggagtttcaacaattgaattagacgtcgaaacgaaaaatatccacgctttaaaactatatacacaatgtggttttgaaattaacacgaggcatgactattataatttaattaatttttaggtgaatacatatgttaaaaaaacaatttattctaattatgatattttagcagacatctataataaacattggggacattttgttgaatactcccatccagcctcgttttacaagatgctcttccctactctcgtatattagatctttgttgcgggactggtcatctctgccggtgatagtttaatttagttgaactaaaaagtgtgtttcacaaagtttactccgtattacataacgagggtatattcgcatttgatatgaataaaaaaataaaaaaactgaatcgaaatgattcagttttttcttaatatatttacaactgcagttgtttcgtcattttctttatagacacgcggaattcttctatctagcatacatgtaacttcatagtttattgtacctaacatatccgctatttcttctactgcgatattttcttcaccttgtttaccgtagaatactacttcgtctcctacttgtactggcatcgcttttgaaacatccaacattaactgatccatacaaacacggccaataacaggtactcgaaccccattaattaacgcatagcctttattagataattgacgattataaccatcagcataaccaattggtacagtcgcaatccattcttcaccagttgttacatacgtattcccataacttacaccacgattcttcttcgcatgtttaatatgagctacttttgattttaacgacaacgcaggctgtaaagaaacgactgaatgatccacttcttttgatggatacataccgtacactcctattccaacgcgtaccatattttgaaatgtgttacttaattccattgatcccgcactatttgaactatgaatatatggtatttgaattcctaattctttcgctgtattaacagctttttcaaataaacttgtttgcatattcgtatatgatttatcgatttcatctgccgtagagtaatgcgtaaacatccctactacctctacatactccatacggtttaattcttctaaaaatggtttaacttcttcttcttgtaaaccgatacgactcattcctgtatcaattttcacttgaatttgtactttcttttgaagacggtttgcaatttcatttataccatgtaaatcttctactctataaacagtcatcataacgtcatattgaattacatcttctacagccgctactggtgtgtatcctaaaattaaaattggtacagtaattcctgcttctcttaattctattgcttcatctacaaatgcaactgcaagttgatgtattcccgcttcaattgcagctttggcaacttcaactgccccatggccatacccattcgcttttacagcagccatcatcttaatttcttcatcatttacatgttttttaaattcttttacattatgttttacagcatttaagtcaatttctacaattgtatctcttccatatttcaaactcattggtctaactcctaactcaataattgcattccattctatttcacgtttcatatgaccttttacaatataatacttttcattatgctagtcaaactactagaattttcggaattttgagtatgatataatatcctcaagaaactattatatacggagacgaggagaattacaatgtttgttcaatctgcattgcatcaactaaaagttgctattgatacttctatttatatgcttaaccaatatagtgaaaacgatttaaaaatacaaccgattcactcaaaacgatcattatttgaaatgtgtgcacatctttctcttatttgtcatgctgatttactcattttaaatggtatttcagaaaaagaattacataccttttatatagaacatacacccgtaacagttgctcacatgcaacaaacgatgattgaaggatacaaccttctctctaaaacatttctttcctactcccaaatagaattagcaaaagttatgactgcctattgggggatttcttattcgcgctttgaatggttacttgaaatcgttgcacacttttatcatcatcgtggacaaattcatattttattatgcgagcatatgaaagatcctcgcattcctttatttgagtgattttccactcattcattaattagctacaaaaccaataaaaagtatcattcctaataaaataaatgtttgagcataacctcctattttcataagataaatagaaatgataggtcctatactagtacctaaaaataaaataaaagtatattccccttgctttccctcctaattgacctccaagagaaactaaagacggaacggatatagcaatacctattacaaaacagacactcatcattacaagtagagatagatccgaaacaaagcccattgaacttagactaaaaataacaatcaacaatcctccttgaagaactttccttacttcaaacctctttgttaaaagacctgcaagtggtgacagcaacataccaaacagccctgctaagcgaaaataaaggatttgttctgcagttaaattgtaagtaggagagctcaaataattccctaaaacagtatacatattaacaaaagccattattaaaacaggatttttcacactgactaactattagttttaaataattcgcaacttctttaaggcataagaaattccgccttcactcgccttcgttgtaacgaaatcagcccttctcttcaactcctctccaccatttcccatcgcaactcctaatcctacatactgcaacatctcaatatcatttccaccatcgccaaaagcaatggcttctaatttactaatgtttaaatgttccaatactttttgaattgcagttagcttcgatactttactatcttccaatacatttataacgtaaccatgaaaacgctcaaacgtaagtgctggatatctttcaatgaatttttgagcttctgtatcatcagcatacagacatatgcaatacatctcatctgataagtttctaactttgtcaggataccgctctaaatttaaagtttcatttaacgctcgcatgacacgttcatctttggaagcaatattattcattgcaaattcttctgtaaagtaagaaacactgtgaccatctattatgtataaaactttaatttcttaaaactgcacaaaatggctatattacgcagttttgtactgcatctaattttataaatggcaacatatttctggtcatttgtgaccaaattcgttaccgaaataattcaaaattaaactaataaaaaataaaagagcacagcgtgtataaagagtgcgtcaacaccctttataccgtccgcctacaccaactaggcaaacacttgctgtaactctttatgtactttattttaccgtacgtaagggttcttccgcaacagtttgcttacattttgtggcatactgttgcttttttattttcaaaggagacgagcccttatgaaaaagaaacaagccatcaccattcttgctagtatagaaacatatgaaaacttagtatcttttcaaaatctcaaggagctaaatgacactgtacgcgcatataaagaacaatttgctgatcgattaaataaaaatcaattggctgtactcaatcacttacacacccattcttgtaaatattttggcgtttcttttaaatccaaaaagaagattgctgaagtacttcatattagccgcagaacagttattcgtgcatgccaacacttagaatcacttggtatcatcaaacaactagaaatgaaacgtaaaagtgatatgagacaaacaagtaacattattgtaatccaaccaatcttcacaaaagacgagtttgtcacagaagcccctactaaaactgtggaaatttgtcacaccaagaaaacaactactaaaaccttaaaacaaaagataaaagatataaataaacgtaaggtagattcagctgacacaacacctgaaaagaatgtacaacaagcaaattttattgcacactgggttccagaacgttttgcttctctagcctctgcttattattcaaaagcgagaactattcaagaattttggaaagtagtaaaacagtgtaattgtgtagtaaatcatacaacaggggaaactgcttttgataaagaacaagaattacatattggtgtacaggccatgaaagaatttgtgatgaaaataaaagatggagcccgcatgaaaaaaggatggttctcctatttcaatggtatcgtaaacaacttgatgaacaaatattattttgaccccgaatttggtatgtgatatcttcttttacacttcaggtaccacatatacctttgcatatacactatgctgcacagcaaattgttctagcgtcttttgcctatatggtgtgattgtaaagaagtgaacaataggaactttcccgttatatttatttttataatacaaggtgaattcaccatacttattcattttttcgctgttcacattcatcatttgtgtacgatctatttcaactgcgtttaaaatcccgtcactatcacggtactttacatctggaataatcgttctcttattttcatgcactttataacgtataggggcttctatctgccaatcttcaggacaaaatagatacaaccacgcttcgttcctcataaggctgtgtgctaatcgaatggtaggtacaaccttttctgtatcatcgaatagcgcacgtccttgtttattgaggtaatatacatgctcttttttataaacggtactattcacatatggacttaaatcttttaaaattcgatttgcatttcgaattcctcccatatcgtgaattgccattaagtgtcttcttgtcgcaaattttagctttctaatcgaggtcaaaatcatcatctgacgattcattttgatatgtgtctgcatatgcatcttttttcacctcgtattgttttaatacgtcccacatttgttcatttgagatataagggacttgaacttctgttaatcgatctgttttaaaaagcgcacgccccggtatactttcaatcaattcgagaccagtttcatcgatgacaacttgagaagccgtttgagttggtaaccgaaatcctaattttgcatcactgttttgtttgacttgacgtggtaaagtatcgccagtagggtattgcgtgcaaaaaatcaatcgaaatcctaatgctccaccaattcgcgctatatgagaaagcatctgttgacaagctcctaataacttttgttgttcccgattcatacttttatcaggacaaagttctgccccttcatccacgataataaagtagcgttctcttatatttgtttccaccacattggtataatggtgttctttcataaaaagcattttttcttccatcttttttagaatcgcccttaatacctgaaaagcttccattggcttttctgcaatcgactcaatctgttttacatttttgtatggtccgaactctaatcctccttttaaatcaataataaacaagtgcgtatattctgcttgtgcagtaataagagatgtcatcacattctttagaaatacagtctttcccatacgtgttaaaccacctaatgtcatatgtggtgttttatcaaaatcgtgataaatcaattgttctaaactttgcccgattggcacaagccattttccaactttcattaaatttttcgaccattcccacttcttcggtatttcttgatcgaatacacgaatgttcaatctataattgtcatactgaattcgaacaggtttatttaacccttcacttacaacatcttcaacctttcgaataattttacttggcataccaacaggcaactcatacacgtatgttgtacttctatcatcatgagttcgtttcttaaattttggataatgaatcttatcatcttttttgattgcaattcctgacacttcaaaaaacacttgtatcttctttttatcatctattttccttttaaaccgatcacttacgaatgcaaaagttaaagctgtcatcgggacccatagtaattccaacataaacatttctcctttagatatcctataaggatatcattgcactttattggaagcgaacaggactagcatttttgcttgtgaggtctattgtccctctcttccacatcgtattccttcatagaaacataacgagaacgtaacgtagaagatataagaacgagcccgtaagcgttgtatacatagtcatacgtggaagccaatatggaacactcttccccattttttcagctacactcatcgcaactacagacaagcctgttgccgtccaaataataacgacttctcctgcaagtgtcatagccattcctcggtcaattcatctttctcacgaaatttaatccccgatttggtagctacaatctgataccgctccattaaatcttgccaattcaatatatcttcctcttctccatataaatcttcttcaattacttgtgataagctgaaatatcctttgtactctttgttatcaaatacttcatggttcctcatgtgagtaagaattgattccgtttcttttctagatctagattcgttatacatgtgacgtagttcttttgatgaatataaataaggcgttgtattgaggtaactatactgagaacgcatgtaaccctctcctctcttgatatctacaatgccatacggaagtccaagtagaattcttcgtgggcttccgtatggaagtaatataggtatatgaaccagaaggaggattattgcctgtacacctgaaatttattttttaagaggacaaaaatgatttcactagaatatacatactaggaggtggaataatgcttcaaagtaatttaaaacaaattgtagataaaaaaggcttgcgatatggatttatagcgaagaaagtaggtatagcaaactcaacaatgactaatttgctgcaaggcggaacaccgacacttttagtagcaattagaatagctaaggttcttgatatgcgtgttgaaaatatttggattgaaaaaaataaggaggatacataatgaaatttaagcttcgtgttattttatttttagcgactatttttttagcaatcattacctttttcgcattgactactagggatgataataaaatatctaaagatgaatttaaaaacatccatcaaggaatgtctatccaggaagttcgaaaaattattggcggtgatggagaagaaaataaattaactgatactattactgaaattacatataaatcaattgacggtataaccaacggagaggttaaattttcatttaaagatgataaattattttctattggagattttgcctacgcttcatctgaaagtaaaacttatcaatctgatcaaaatcaaaactcaaataattccaatgaaagtctttccacaacaacacttcctacaaataataatttagaaaaaaggattaaggatattgtaaaatcgagcattggttcaaaatcattaacaaatttagaaatcaacaaaaatatggggacagcaactgaagatgataaaattgctatacttactatccacgcaagtgataaccttacagataatatgtttaagcaaggaatgtggatggacacacaaaaaatcttaaaaggtatagccaatgaaaaagaaataagtgagattgctttcttttggcaatttgaaacagttgatccatacggtactaagaaagttgataatgtgatgaaaataatttttaatcgcgaaacaattgataaaattaactttagtaattttatctttgaaaatatccctaaaacagcgaccacttattgggaacacccatctttaaaaaaagaataaattcaaacaaaaataagagccgtcaaatgacggcttttattttttataaaactattcttttgtagaaaatcacttcacatacacataggcttcatttgttgttacatagtatgttttgcctttactattgtgaactttatattgtggtgaaccatttacatttacttttgcatcaattgtaaatcctaatcctgcatctacagaaccagccacatctttatcctgccaagatggagcatcatagaatcgtaggttattaactttagaaacaacacgcttacctacaatagaagaatccactgtactctttttattaaacttcacataagatgggtcgttcttaatccactgctctccaccaagatttaaccaaccatccttttcagcccatacaacataagattctggtttgtttaattgacgaatcttagaatagcttgtacccggtccttttcgtaagttaacgttgtaaccttcaatataagcaataccgtctgttacagctgttggtacttctgctggtttagatggtttttcaggtacagaaacatcaacactagaattgttataagctcgttgtacatcagcacggaattgagcttctgatacgccatgagactttaagtaatcaagtggatcttcatgatctgttccgccaagatatttcgtcacatcgtagtgagtccataatcctttttccacagataaaccacgatcacgtaggattttagcaagtaacttcacatatttatcataactgcgtttgaatttatcgtaatctgctgtttcgcaaagttcaacatgtacaaagcgtttatttgctcctggtccaccaccataagcaatatactttgtatcagcaatttggattgtttcattccagtcaactgcatagtgaacaaatgcgtttctccatgtacgagactcatatttttgaatattgatagctggtgcttctggagtcgccgtagaatgagctacaactccctcataagcgccaacaccgtaacgatatggctgtttaggtaaatctggaataataagtgttctatcagcaaaagcgcttgttgcaatggataaaactaaaataaccgcaaagattacagaagaaatatgttttaatgtctttttcatttttcatcaccattccccatgattttttgtttaatatctgatacatcttttgaaagtgaaccaaatgcttttgcctgttcttcgatgaccgcttggtttttttcaatcactttttggtactgctcttcacgctgctcattctttttttgcgtagtaaaaagcatccacacgaataacgctgcgaatgctccttgttgaaccattgaattaaaaattgcatcctccactgttctcatctcctcgtatgattaagttaggtttttagggacgggatgtacctataaatccaaggggttcaatccttagtagctgcttaatatatttgtctaattttttgggttcagttcataaaatcagtggtcttttaaatgattaagcagctttctgttcagtttgaggaacaggtttttgaagcgagttataaactcctgttccgataacgtctaatgccattctcattcgttcaggtgaaatgttttctaatacgttatcttgaggtgtatggtataccttctcaatatgatagattaatggattccaactatcgacacccatccaaatgaatagagcagcaggaataccagcttcagcaaatggaacatgatcactagaaccgaatttaccttgtaggatgaggttattatttagttgtttacctgcttgcaaggcagcgtctgttacaaagtttgtagagccatcagatgtcatagcatataaattctttgctttatcataatttgttgcaaccatgtcggcgttaaagacacctaaaatacggtcgcgttctttttgggatagactattcacgtaataatccgaaccaagtaatccagtttcttcagaaccaaaggtaataaagcgaatttctttatcagtttctacattttgaaaagcacgagctagttctaatactaatccagttccagaagcattatcatttgcgccaggtgctccgacaacactatcatagtgcgagcttacaacgactgctttttcattacctgtactcttttttggtttctttttggcgataacatttagagatgttaatttagattcatgtctcgcttttagggaaagaattgttgtcccctttttagcgatttcttctttaaatgcatttccttgcgcataagcaagaccaaagacagggatagattgctttttcattaggtggggattgaaggtttgtccataatttccgcgtccgccaattaaactgtataaaagaacaccttttgcacctttgctaacagcattttcaacttgtttattatagtcggtaactgtcgttcctctttcaaataaaacaattttaccgtttacttcatttggaatatcttctaattttgtcccaccttgaacaaagataaggggagctgtaacagcttctgtagaaattagtgcattaggagcggcaccagcttgccaattacgttttgttgataggggtgattcaatgaatccaacgtattgatcgggcacctgaaatggttgatattctacgtcatagcccattgatttaagctgcataccaatgtaacgagaagcccattcttcggattttgttccaccggggcgaggaccaattgtttcagataagaaacgaacatgttcaatcgcgcggtttggatcaatctgttttgtaatagatggagtttgtgtaacctctgacgtggaatccgcttttgcttgcccaattggagctaagctaacagcaagtgatacagcaagcaaagagcttactattttttgtttcaataattttctcattttttcctctcctattcttctattctctctgactgacaaaagaagacggataatgactttattttaccttcacaccttttatttttcaatattctgacattgataaataaaaaaacgatatatgcatatttgcatatttttgagggagatatgtatgctatcattttaaacgaaggttcgctttctactctgaaagctcctacattgcatgaatctagtgtacccaaactttagattatgtagaggaatggaaccactgtagggtttcatttctcatgtttgaatcagttgatggtaattatgtttccgcatttcataattattatcagtgatatatgtaaggcatccatatgaaaataagaggctgttcaaaggttttccgtacttttgggcagcctcaccccgttaaaaggacgatactttatgtatcgtcctttttgtataaaaaaacatccaatcaattgagagattgattggatgtgaaaaaattattaataattttttttgcgttttgtagctaaaatacttaataatccagctagtagaagaacaatacctactgtttgtgtagggtcttctttatgacctgtatttggaaggtgcttatccgtatttcgatcatcttgctgtttgttatctgttttattcgatgtttcttcggaagttccgttttcgtgtttctcagatgtttcattgcctttgttatcttctttatttggaggagtaattggcttgtcatctccacctgaagaagattcaatttttttatttgaaactgtaatttgtagtggcttagcttgggctttatcaattgtaaagtttattggtgatgcatctaattgatagcctttaggagcctttgtttctactaattgataattaccaggtttcaaatcatttacgattacttttccgtgttgatctgtttttaaaccttctcggatgacttttccatcttggtctaaaatattgaaaatggcaccttcaagtgttccatggtgatcaatatcaactttagttaactcaattgaacctgttgttaaactatttaaggctgtaacagaggtaacctgagattgtcctttcgtaattgtgaaaggaattggtttaacgtttaaatcatagccagttggagctttcgtttcaatgaactgataatctcccggacgtaaatcagaaactgaaatcttcccatctttatcagtagttaaatcagtgcgaacaattttacctttcgcatcgatgatgttaaacactgcatcagaaagttttgtatctggatttatatcatccacttttattaattctacagcaccctcagttaagctatttgtagcagtaacttggagcttttctttttggcttttcttaattgtaaacttaataggtgtactatctaatttatagtgttcaggagctttcgtttcaataaactgatagtccccaggacgtaaatcagaaacagaaatttttccatgtacatctgttgtaagctcagtgccaatgtcgttaccattcatatcagtaattttaaatatcgcacctttaagagcagtaccatctacatcatctactttagaaagttccacagtgcctttcgttaagctatttgtagctgtaacggagataggatcagcttggctctttgtgattgtgaatggaattggctctttgtttaaatcatagtgtttcggagccgttgtctcgatgaattgataatcaccaggacgtaggtcagaaacgctaattttaccttgttgattcgtaacaagatctttgcgaattacagtgccattcatatccacaattttaaatactgcgccttcaagagtagtgccatcgacgtcatccactttagaaagttccacgccgccttttgttaaactatttttcatagtaacggtagcaatatctttttggcttttttcaattgtaaatataattggttttttgtctaaatcatagtgttcaggagccgttatttcaacgaattgatacgtaccaggacgtaaattttcgataacgattttaccttcactgtttgtttttaaatctgttttaagtactttgccatcttgatctagtaaattaaataccgcatcggcaagttttgtttgagtgtttaaatcatcaactttaagtaattcgatactaccttgttttaagctatttgtagcagttaaagaaataactttcttctgtcctttttcaatagtgaatttgattggtgtttcatctaaaacgtaatgcttaggagctttcgtttcgatgaattggtaatcaccaggacgtaggtcgttaatttcgattattccttgttcatttgtaacaaggtctttatgaactacatcaccgttcatattaacaattttaaatactgcatctttaagaacagtgccatcaatatcgtctactttagaaagtttaactgcaccctttgttagagcatttgtagcagtgatatgaagagtttcagtttggctctttttaattgtaaatacgataggttttttatctaaatcgtaatgttcaggagcaattgtttcaacgaattgatacgtaccaggacgtagattttcaacaacaattttaccttcagcatttgtttttaagccttcttcaactagctcaccgtctgcatctaataaattaaatacggcgttagaaagttttgtatttatatcaatatcgtcaatctttgttagttcaacgctaccttttttcaaagcatttttgcctgtaacattgatctctttcgtttgacttctttcaattgtaaatggaatcgttgtttcatctaatacatagtgctcaggagcttttgtttcaatgaactgatagtctccagggcgtaaatcagaaacagaaatttttccgtttttatctgtaacaagattcgtatgaacttccttaccattcatatccacaatcttaaagattgcaccttcgagcatcgtacgatcgatgtcatcaatttttgttaatgttactgcacctttctttaaaccgttagtagcggtaacagtaatattctctttttgacttttttcgatagtgaacggaatagggtctttgcttaaggtatagtcttttggagcttttacttcaataaattgatagtctccaggacgtaaatcagaagcagtaattttaccgtttttatcagtcgttaaaccttttcgaattacctttttagtatcatgagcgtcaacgattataaattctgcaccttcaagagtagtgccatcaacatcatcaacttttgttaaagtgacgccacctgtaagtaaactattttttacagtaacagggataggaagatcttccttactaccttttttaattgtgaacttaataggtgttttgtctaatttataatgttcaggggcttttgtttcgataaattgataatcccctggtgctaaatcaggaataactaatactccgtgatcatctgttgttaaatctttcataatttctttgccagttgcgtcttgcaatgtgaatacagcgccggcaagagctttactactttccacatcatcttctttaataagtttaacttttcctttcgttaaactatttttaaatgtaagtggaaggagtttttgttgtcctttttcgattgtaaattcaattggttctacatttacatcgtaataagttggagcctttgtttcgataagttcatagttaccaggacgtaagtcatctacaactagcattcctttactattcgtaacaaggtccgtacgaacatcttcattagtatctctattaacgattttaaatactgcaccttcaagtgtttccttttcatctgcagcattcacttttgttaattcaataccgccttttgttaagctgtttttagcggtaacagtagcctgagttgtttgactttctgtaatcgtaaatttaattggttttgtatttttgtcgtaatacttcggtgctgttacttcgataaatttataatcgccagggcgtaagccagtagcgatagctttaccatccgcaccagtttttacattttcgcgaatgactttcttttcatcattagcatcaacaattttaaatacagcaccttcaagagctgtaccatcgatatcatcaacttttgttaattcaacatctcctggttttaaagcattttcagctttcacaagtagagtttctttctgacttctatcgattgtaaatttaataggttctgctcgtaaaacgtaatgttcaggagcagctatttcaataaatttatacgtaccaggacgtaggttactaactttaactttaccgtttttatcagtagttaagttagtgtaaggggaaacgtcattattatttgtatcgacaagcttgaatactgcaccttcaagtggttttttctcaccaaactcatcaacttttaataattcaacttcgcccgtttttaagctgttatttgccgtaacagtagcaagagcttgttggcttttatcaattgtaaactcgatagggtttgtacttaacgtataatccttaggagcttctgtttcgataaatttataaacaccaggctctagatctttaacggtaacttttccatctgaacctgtttttatattttcacgaattacttgtttctcgtcattcgcatcgacaattttaaatacagcaccttcaagggcagtgccatcgacatcatcgactttcgttaaagtgacaccacctttaatgaggtgatttgtcgcggtaacagtaagtgctttctgttggcttttatcaattgtaaatttaagcggttttttatctatttcataattttcaggtgctttctcttcaacaaattggtactctccaggaagtaaatttttcgcttcgatttgtccgttaccatttgtcgttaatttggtataaccaggaattcttttgttattttggtcccgtacactaaatacagcaccttctaaagtattaccctctttatcaacttttgttaggatagctgagcctctaattaagctgttttgggccgttttattaattactgttgtttgatcttcctcgattgtaaattcaataagtcgatcatctaattgataatgctcaggagcctttatttcttttaagtagtatgttcctggttttaaattatctacagtaatttgtcctttatcatttgttgttaatttttcgtgttctgaaattattttttggtctttatcaagtagtgtgaaaacggcaccttgcagtgtgacgtttttattcaggtcatcagactttgttaaaactactttaccgacaaacttcttatttgcaagtttatatgttgtagtctcttgtgtaccaagttcaacaattttcccttgttttaaatcccagctaattacatagccttcaggagcctttgtttcttttaataaatacttatcgcgttttaaattattaaatttagcgataccgtctttgtctgttgtaattttacggataacagttttacctgtacgatcgtataaagtaaattctgccccagctaatagtgcgtttttattgtcgttatctacctttataatttcaaggtttccacggcctttagtagcagatcctccgcctgaaccagaagacattctcacttcaatcgtttcagtagtttctgtgtttttaactgtcaacttattgcctgtgattttcgctttattacttactttttctttatcgtctgcattaataagtgagcgatattctaaaatataagctcgatcaatttttttcaagaaggcaatttcgaaatgttgttttccggtattattgtctgttgttattttgagtttatagtctgttccttcttttaattcgtttactgtatcttttgttaaatttccatatggatcaacagttgtaggatataagtggaatgaatcttccacaattacctgattttcggttgggtcatctgttacaacggcatctgcaatggttgattggctttcgttaattgcgatactccaattaatatagttgtcgtcttgcacagcttttttagtaacgaagctgccacctttatttacttgagtgtcacctgtaagggtgtttacgattttagagccatcttttaaatctgcctcgtttttgtaggtgccttggataagttcaccatcaaggcttgttttaaagataatatagtaaggtgaattaattgattgtttgaaatgaacctttagggtgtttttattgttctctgtaggttcttcaagttcatatttctcagttggtacagcattaccaggttgtgcattatcaggatttccatttaaaatcatatcgcgcacttcaatggatccaggcactaacttttgtttatcttgtatgacgtctataacataaggatctttaatctcaacattattatagttaaagcctattatccaagtaatttccttcgtttgggcgttataagaaccgtatttataaccatttgcctttgtgaaagtatcagaatcgaaattagcttcaactttatttgattgtggattagaatccgtatctatccaagaaaggttacctgtatttttaaatgaagttttaccactttctagctttgtataatcaaagtctgtcgtatattttacgactaatgtctttgtcatattagactgatacgtacctataagagtaattttgaagcctttatctgttacatctaaaacatagtcagtcccagcttgaagggtataatttccgtctttaatttctagtttcttatcttttaattgtaatccaccatgatcaaaggtgtccgtaataatcgcgttgtttaatggatagttgttattatttactataattgtccaagttgttgttttgtctttataatttgtttcagctttattattagatttaataatattttgctgcttgaagctagcttcattttctttacttgaatcattatcagctgtaactttattttttacttttccatcttctataactttattagttggcttggttttataggtaatcacataagcactattaatatcatcattaaactgtaaatcgaatccattcttcttgttacttacagtgtaattattaacagcgtctcctgttacaagcgttcctttttcattatatgaagcgttttttacaacaatagaatttgcatctagttcgtgtgtatcgtcaaaaatatcttttaaaatcgcatctgcttttttgatctctctttgatcaccattgtaagtaattgtccactcaattgtttgcgtctttggatcatatttacttgttttatttaagtgtgtaccacgagaaaccgttacagtagagcttgcgttttgttgcttttgattatcactcgttatcgtaacgttatttcggaaacttttaatattttcatcagtaatttttgtggcatattcgatttgatatgctttattgatagaatctttgaaagcaatctccaattttgagccatctgatgaaataatattgtaatctgttggctcggcttctgcaccacgcgttacattcccattaacatcaacttctaaataataaactttaatagaatctttatttaagcttgtaccttgtggaatgttatctttaaaaacagcgtttttaagggtgtctttcgttttgttcatctctactttccaattaatttcatttgtattaattggtctatcaggtaaaccctttttattcgtagctgtttgtacattaggcttaaagtcaactgtaatagaaacatccttatctttaatcgggaaaggaatttcttgtgttgttgtacctttaatttcagctttattaaattctgtctttaattgtaggttaccagcaacatctggatgctcttcaacataatcgttgaatgtcatcgtgacttttccatcttttgtaacagtaaaattaccaatttgatggttttcactatcatataaaggactgttaattgtattgtaaatcttaaaatgtttaggaagatcaaaaatatagtaatctccatttttcacattcattgattttaaaagttcccatgtaaactcaatattggcaggggaatctgtacttggacggttatcctctataaatggttttccgtctttatccgtcaactttacaccggttaaaatgtttgttgttatttgctttggacctgaatttgtattctcagcagggtcgcttgatagcttttgttctggattgtcagtagcaattttagctgctgggttttgttccggattatcagtggcagttttagctgctgggttttgttccggattatcggtaacagttttagttgctgggttttgttccggattatcagtaacagttttagttgctggatcttgctccggattgtcagtaacaggtttagctactggatcttgcgcttgtttattagtatcctgtttggtgccatcttctttatagttttctacttgaacaggaactgatataggctgaaccattgttcctaaaggaaaagcgatttgaactgatttttccccaggttttaaagttgggttaaacacggtatcaactttaatttttcctttagcgtctttcaaattttctacttgatcattaaatattaattttaatttattatctttagctgttataaaatattgaccaatatttttttgatctgttactaaatccccttgcaaatctttagatacttttaatgcaagtggtatttgaactactgctgtatcatttgcgtgtgcaacttgttgatcctttattgaccaagcgtattctacttgaatggttgatcctatctttattaaattgttaggattttttgattcgtcaataatatgattcgtcgcatctttcatttcaacagtgtcaaataaggaatctcctgttaaggtttccgctcttacttgattgtatggaaaactagcaagttgcgaaaatagtacgaatacaattaaacatacattaaaaagttttttcatttttcctcctctgaacattcatttgtccattggggacttattccacatgaacaaatggaatattaaaagtatttgttataagctatttatttttgttatccctccgtttctatacgcgttctcagacaaacagaattatgttcaaagcaatattatttaacgtaaaacaaaatgtatatttacacagttctatggaaatatacacaattcgacaaaaaatgtcgaaaaaaatactgatataaataatgatatcagacctttatatgtgagatagttttcatgtatatctagtaaaaaagaatggttataaaggtaagttttacgatacatactaaccaatgtagtgtatccctttgtgaaggcttatttttgccttaaagttatgtggaaataaaaatctagatagggttggttttggtcagaatgaagacaatatgtactttgaaaatagtcatttattttgtctaaagagagtcgtgcgattagtggaccgaagttgaaaggtgatagtttcttacattgttagagaaatataaggattacagaatattcgactaacacgttactacggtcatttttgagcctgtttaaacaataagaaagaaggtgttttactccttagttacaatatctttttagtaaagataagcttaagtaacctccgctaaagattatatacttaaatgataaagagttcaacactagttcacatattttcccaaaaataaaaaacggctgttttatgtggaataaatctacaaaacagccgtttttggtattagatttctgttaagattattggttcaccgcgtgttacgacaacggtatgttcacattgtgcaacaagacttttatcaggtgtaacgaatgtccaaccgtcgtcaccacgttcaataatatgatcagctttcatagagatgaaaggttctacagcgataacaagaccgtcttttagaagtgcattatccattgggtcatagtaacttaaaatgtgatttggtgcttcatgtaagctaagaccaatgccgtgaccagttaagttttgaataacattgtatccacttttatgtgcgaagtttgaaacagcacgaccaatttgattttgttttgagccagctctaacctttttcattgctgcccaaaatgcatcaaccgctgcttggcaaagtttttcttttgcctcgtcttctccaagaacaaatgaaatgcctgtatctgcataatagccatcaagtgcagcagatacatcgacgtttactaagtcgccttcttttaatacacgatctcctggaataccatgagcaacttcttcatttacactaatgcaagttacacctggaaaatcatattctttttcaggtgcagaaatagcaccatgctcatctaatacttttttaccgatcaaatcaagctctttcgttgtcatacctggcttcgcttgttttttcatttcttcacgtgcaagcgcaacgatgcggccgatttttcgtaagccttctaaatcttgttcattacgaataatcatgaaaaccactgtccttcctcgaatatatatcttatccgattgtatcatgtttattttcgtcctgctactcgcttgcggtatgcgggttgattcctctcataaagaatacatgacaattgtcatatcgatgtcatgacgcatcatactgtttcctaagttttccaaggaatacaatgtaaatataagaaacagcgggggtggagagatggaaaagattattgaagtaaatgatgtttctaaaacatttaaacataaaaacgcagtaaataatgtttcatttcatgtaaataaaggggaaatagtagcgttgcttggtccgaatggtgctgggaaaacaacgacgatgtcgatgatgcttgggttaaaggaaccaacggaaggtaaggtctctatatttggaaagagtccaaagcatagagatgttcgtaatagcctcggtgcgatgctgcaagaagtaagtgtcattgatagtattacggtggaagaggcaattgagttattccgtagttattatacgaatcctatagagaaagagacgttactgcagttatcaaatttagaatcagagcgaaagcaaagatgtgagaaattatcaggtgggcaaaaaagaaggttaaactttgcgcttgcacttgcgggaaatccggatttgttatttttagatgagccgacagtcggaatggatattacgtctcgaagaacgttttgggaaacgattcgaaagttagcaagtgaagggaaaacgattattttaacgacgcattatttagaagaagcagatgctttagcaaatcgtatcttattatttgcgaacggaaagattatcgcagatgttacaccagacgaaatgaaagcaacgatttcgagaaaaacaattacattttactcaaaggaaagcattcctacaaaattactaaaggaattaccaaatgtaacagaagtaaagtcaaacgaaggacgcttcattttaacaacggaggatacggatgcaactttaaaagccatttatcaaaggagtttacctgtaacagatgtttcagttgaacgtggaagccttgatgaggcatttgaacagtttgtcgcaaatcagaaggaggaaatcgcatgagagcgttatggatgcagtgcaaaatagaaattttacgtacattccgcaataaattatttatctttttctcattattaatgcccgttatgttttactacatttttacaaatgttgttcaagtaccacaaaacggagatgcgtggaaagcacattatttaatttcgatggcaactttcagtattgtagggactgcactctttagtttcggtgtgagactttctcaggaaaaagggcaaggatggacacatcttttaaaaattacaccgcttccagagggagcatatttaacagcaaaaattatcgctcaaacagtagtaaatgctttttcaatattagttatttttattgcagggatactaattaatcatgttgagttaacggtagggcaatggattggtgcggggttatggttattattaggggtaacaccatttttagcgttaggaacagtaataggttccattaagaaggcggacgcagctgctggcttagcaaatattttaaatatgagtttagctatagttggcgggttatggatgccgattgaagtattcccaaaaatcttaagaacgattggtgaatggacaccaacataccattttggaagtggtgcgtgggatattgtagctggaaaatcaattggatgggaaaatatcgcggtattaggaggttatttccttatatttgttgtagtatcaatatatataagaaaaagacaggaagcggtataaatgatagagaagaagaggattgagatttttccaaaacatatgggattttttccgtacatgtggcttgtgtatttattatttccaatttaccatttagcacaagcatcagggtggaagcttgtgctaggaagcggtatgttgatactttttattatcacataccgtcagctatattttgttcagaagacgtttattttatgggcatgcattcaaatgatactcatctttttatttgctttattttataatccttttatgatattttttggctttttcacagcaagtgcgatgggatttgcgccaaataagaaagtatttcgagtgctgttatgctcgttagttataatgcttggagcatttttatttgtaaatatgaatcaaataacaactacaagtttagtaaatatcgttccgatgtttattttaatgcttcttacgccatttggtatgcgtaattttaatcagaaaaagatgttaagaaatcaattagatgaggcgaacgagcaaattaaagacttagtaaaacgtgaagaacggcagcggattgcaagagatcttcatgacacattagggcatacgttatctcttattactttaaaaagccagcttgtagagaagttaattgtgaaaaatccagagcgtgcaagtgcggaagcgaaggaaattacacaaacttctcgtacagccttaaaacagctgagagaattaatttctgatatgcgtatgattacggtagaagaagagctagagcaaataaaagcgatcttacaagcagctaatattgaattagaagtgaggcaagaagcaagatcgagctcgttatcaccaattgaacaaaatattgtcgggatgtgtttacgtgaggctgttacaaatgttgtaaaacatagtaaggcgacgcggtgcgcagtttctgtattagaatcacaaggtgaactgattttgaaagtagaagataacggaatcggtttaacagatcaaaatcatgatggaaatggtattcgcggcatgaaagaacgaattgctcttattgatggatttgttgaactaggtacaatcaatccagggacgttgttaacagtaaaagttccagttgttattagaacaggaaaagatgaggtgagggcatgatccgaattattattgcagaagatcagcggatgcttcgtggtgcgttaggggctctgcttgatctagaagatgatatcgaagtaattggacaagcggcaaacggggaagaggcgctaaaattaattgaatcgttaaaaccggatataagtatcatggatattgaaatgccgattcaaagtggattagatgttgctgaagcgttaaagaaagaaaaatcatcatgcaaagtaatgattttaacaacatttgcacggccgggatattttgaaagagcaatgaaagctggtgtgcacggctatttattaaaggatagcccaagtgaagatttagcggcagcaattcgtaatgtaatgaaggggaaacgagaggtctcccaagatttaatgtttggcttatggcaggagcaaaatccgttgtcagatcgcgaaaaggaagtattgttgcttgcgaaagaaggaaagacggcaaacgaaattgcgaaggcactttatctttcgccgggtacagtacgtaattatatttctgaagtattagcgaagcttgatgcgaaaaatagaattgaagcaattacaattgcggaagaaaagggatggatatgaaaagaagtttacctatgattggtaaacttcttttttattattgtaccgctattactttatttattttttgtaacggtttgtaaccgtgtgcttcaaatgcctttgcaaattcatttgatacggcagtgccatataaatcttttgcagcttgtacaatatgagattgaagtgattcaaagtcttcagcggaagttgcataattttgcaatgtacgcataacaactttacttactttttcatttccttgcttttgaacagcaacaccgttatatgttttaccttcagctaattgatataatacgtgactgataataccagaatttacgtgtgattcttgattattaccatcgttatagaaatcttgtaaatttgtatataatttatgaccgccgtcaccaatttcctttgggatatcacgaattgttaggccgcctaatgtatcgcccataatccagtttcctttatctttctttacgtaatattcgatttgtgtaccccagaaatccgctaatccctcgtttagtgcagatgtttcagcgcttggatatctcacgactttatttttcgtcgtgccactaaatacagcatgtccaaattcatgagctgttacatcaagagcggatgttagttttccgtctagaccatcaccaaataccatttggttccaagcgggatgccaaaatgcatttacatagtcttcttttacaccatcactaacttcagtagaatcaaaaccgtgtacactagcaacaacttttgaatctttattgtcgtaactttttagattatgttctttcttaaagtaatcgtaaatatcactcatattcttcatagcgcccgcggcttctttatctgcaaaattaggattgctacttgaaattagtgtccctggataaccagcttgactatatcctccgagggaatcggcgtagtttgcattataaatataaataccatttccgcgtgataaatccgctaaataaaatttcccatcagttcctttggcaatattgaaagagatgttttcttgaagtgcatttttcccagttccttgctcacttgcaggggataatctaggtgatgttacttgatttatagtcttattctctttgtttttaatgaacttttcttggaaaagtacttcgccagtttttagatcaacgatagcattgccgtttataatttgttcattgttttcataagtaaatgtaataacagttgcgaatgtataatagccatcttttttcttataaacaacggtttcgctagagaattctgtctcaactgcatcacttggaatttgaactatatcgcgtaatttagattttacttcatttttcgacaaaaaatttgttatagtaagattaggttgttgatttaaattctgaacaactttaccactaacagttgtgatcactccatttttatctacttttacaatgagatcttggccatatactttatagtttttatatgtttgtgcaaggcgaacttcggtttgattttctttagtttctttatttgtaggttggaaatctacatttttttcagtagtgacttgttcttgttgagctttcgccccatttacctcaccttttaaatactttttagcaatattttctttcgtatcattttgaggttgtgttaatttcccgattgttaaaccaggctgagcaatttcaactttgactgcacttttgtctaactcttgagcatgaatagcttctgttgataaagggcaaagaagaccgaatgtaacgaaagcactagcaagttttctataattcatctataacactcctaatctattattgtatgtgagatgaattgtatgaaaaatttgccgaattatatatatattatgcattatttcatatcaaaaattgtcgaattcacattattgtagtggtatgacaacttaaaaaactagattgttataatgggatggtgagtaagtatgcacgcagaaaaattaggaagtgaaattaagaaaattagggtgatgagaggattaacacaaaaacagttatccgagaacatatgtcatcaatcggaagtaagtcgaattgaatcgggcgcggtatacccaagtatggatatattgcaaggtattgcagcaaaattacaagttcccatcattcatttttatgaggtacttatttattctgatattgagaggaataagcagttaaaagatcaaattattctgctttgtaagcaaaaaaaatataaagaaatttataatagagtatgcaatgaattgaaaaaggaagaatatcatcccgagcttcagcaatttcttcaatggcaatattatgtagctgcttacgtattgaaaaaaatcgattacgaatattgcattttagaattaaagaaattgctcaatcaacaactggtaggaatagatgtatatcagaacctttatattgaaaacgcaattgcaaacatttatgctgaaaacggctatttgaagcagggtattgatttgtttgaaaatatattaaaacaattagaggcattgcatgataataaagagtttgatgtgaaggtgagacataatcatgcaaaagcattatacatagacaatcaatacgaagaagcgctttgtcacgcaaataaagccattgacctatcgtgtcgaattaacagtatgacattgattgggcagttatactttcgaaaaggtgaatgcctagcaaaacttgggtgtgatagagcagaaattgaagatgcttacgaaaaagcatgcttcttttttgatatattaggaaaccatgaattaaaagaatcacttataaaaaaaatgaagaaataaaaaagacataaagaacaaatatgcataattgcataaagtctggataatttttcatgatatatttaaagaaaaaatgcgggtgatggaatatgaaaaaactacttattggtagtttactaacgttagcgatggcatggggtatttcattaggagatacagcattagagaaaaaccaaataatttctcataataatcaagagatacaattagctaatgaagtaccttttgagttctaaaaaacaaccgtcttacttagacggttgtttttttatggagtaacatccaaacgtctttactagaaacaggtttgctaataaagaatccttgaatgtgatcacaattttgtttatgtaaaaattcccattcttctgctgtttctacaccttctgcaatcacttttaaatttagttcttttgatagtgtaataatggaagagacaattgcttcttctaaagggctagttgtaattccacaaataaactctcgagcgatttttaatgtgttgattggatattttgttaaataagctaaagaactataaccagtaccaaagtcgtcgattgaaatttgaataccgagattttgaagttgttctagttttgcaactacagattgattttgattaattgcgatgctttccgtaatttcaatatctagtgcttctggtttcagttctgtctcttccaacacctttgaaatagttgggattaaatctgcatggttaaattgaacaacagataaattcacaccaacttttaagtgagaaaaaccttgattatgccatctttttgcttctaaacaggcagtacgtaaaatccaattgccaagttcaataataaaaccagtttcctctgctagagggataaattgggcaggagatacgataccgagttttggatgcttccaacgtattaatgcttcaaaaccgataatttgttttgtttttgtgcttacttgtggctggtattcaaggaaaaattcattttgttgtaatgcttttgaaagttcaccttctaagaattgaatttcattttgagcgatactcatttcttttgagaagaaaacaaatctgttttttccatttgctttcgcacgatacatagccatatcagcatttttcattaactcatttacatcagttccataatcagggtacatcgcaattccgatacttggtgtaatagagagttcttcgccttgaatgaagaatggtttgtttaaaatagttaaaatctgttcagctataaaaattgcacttttttctgagtacatttctggtaatagaattgtaaactcatctccaccttgacgagcgacgatatcttttgaacgcaagcaaccgcgtaatctttttgctacttcaattaataataaatctccgacgtcatgaccaagtctatcgttaatttttttaaatcgatctaaatcaaggaatatgacggcgacatcatttgcgttagtttgagctgtatttaaaatggcttttaaatctttttcgaactttcggcgatttggtaatccagtaagtgcatcgtgaaaggctaaatgttctacttgtttttgtttttcatataaggtggtaatatcacgtgctatcccaaacattccgaccacttctttgtttataaaagtagggataagtgtaatatgaagataataataatagccttcttgttcttttgtccgaacttctaacgtttgtggcctaccttcctttgtaatttgtaaagccttctttagtagttcgtggtcttttgaatcaatgaagtgtaccagagaatagcttgccacttggcaataataggcagtaaataagctttcgcaagccttattagattgttgaaaaatgccattcatatttaaagagaaaacggcatcgggatgatcttcgaataaagacttatagcgttgttcactttttgataatgcaaatgcaccttcttcaacttcatcctctagttgtgtagtcaactgttcatatgtaaggattagtgcttgattatctttccacatgtaaagttgccgcaagaataacaaaataagtgataatacgagaccaattaacataaatttatcatcccaaggttgaatgataataaaggaaaaagtaataattatactaaaataaggtagtataaaacgtacataatcgaatcgataatattttgctttcgtttcatgttgcattggtttatccaagatatatagtatggaagaaagtccaattaataaaatagaagcagtgtgtattaaataattaaattcaggagaagttttcatcccaaaatttaattgaaacagatgaatgtaaccgtatacgagtataatagtgaaaccgataattaatgcgattctactagaagaatattgttctcttctatatagactaataacggcgtaaattactaatgattgtgcaataaaatagccaattaaaatccaagtttcctttgttaacatacggaagcttgaaaggtccaagataaaagttaaagtgaaataaatgttcataataacaataaagatgctatcgaatgaaaattgagcaagacccttaatagagtaaatttttataaactttatagcaaatccaacaaagagtaaaacatattgtatgataaaaaaaggtaatgctttatatgagaatataacttgcttatgaatagaaagtgaaggaagaaataaagttatttccatagctaacccgcatagacaagtacataataataaaatccaaaataatttatcaccatgcgtcatttttctaatcgctttacataagcaatagcaagaaaaaagtgcagcgaaacagaataagaaaagaatcccgatttcttttatattcgactcatttggtataaggaatatccaaagagcaaatataaatatgtatattatgacagattgtatatactttttttgattaatcatattatgactccgtttcaataaagttgaatctcggggagaaaatgctaatttaaataatagcatataaaacagaatgttttttactataaaaattacttttttgaaaaaatggtgcaaagttacaatttaccactgtaacattgcaccacttattcttttaattcctcttatagcagaaagttcatctattaattggaatagtgctaagtctttttgtttactttcaatcataatatcgaaattatgattgtgtttttttgcaatgtgtaagaaaggcttaataaactctaaatcgatatattcagcatgagccctaaattctttttccgatctcggggaggaaatgtgaactttaggagagatatttgtatgtgaccaagtttcaaaaattgcaggaagcaactcttctagtggttcctcgcaaagattggccatatgatgatgataatcaaatacaaatggaatattttctttttggcaaatggataaagtttcagcggttgtataggttttatcatcattttcaagagtcatttgtttttttatatgtgtaggaagtttttttatgttttcatggaagcgctcaattgccttttctttatttccataggctccacctacatgaatattaatgtaagaagaatctgcaatgcctatagcatccaatattttataatgataagtcatatccgtaatagcgttagtagtaatatgtggcttgtcgcttgtaaatagcgtaaattgatttggatgaaaacttattcgtaaattgtgttctttaattaaagcccctattttacgccaaagtggtgtgaataccccatgcccatcaacttaagaatttgcactacccccaagtgtcaaaaaacgttattcaaataccctatagaatagacttttttcaagtgtctattctatagggtacattttaaattgaaagagtcctttttttatttactagatgaagtttgtttcaatacaaattgctcgattgcatgagcaacaccatgttcattgtttgttagtgttacaacatcacatagcttttttacatcttcttcagcgttgcccattgcaacagataaacccgctacttctaacatcggtacatcattaaaattatcaccaatagcaactgtatcttcaatagggatattaaaatgagctgccatctgctgtatcccgtttcctttatgtccattcttatccataatttctaagttagtaggagccgatgctgtaaccataatatcagcatcctcttgtaatatacttaatagctgtgcgcgatgcgctgcattaaacgttaaaatgaagaatttagatatttctagttcttggttatttacaacatcttctatttttttgaaatcagtaattaggttcgatttcttttgcttttctgtaattcgttcaagttcctctaatgtaacatcaagcgcatgcttattttcttcgaatgcttgcatcacttgatcttgccatgtatatggagaataaactcctttatttgtatatagcttatatgggaaaccttcagattctagtaattttgcaagtttgtacactttgtcgttttgtatacaacgcgagttaattacttttccatccacataaacaatagccccattgcttgctccgactggaagagataatttatattcttccaatagctttaaagcatcctctttcgcacgaccagaacagatcattacaatatgaccggcttcttgtgcagtttggattgcttgtaggttttctttggagatttcaagattagatgatagtagtgtaccatccatatctaatgcgattaatttcaaaatgaccacctctttgtttttattatacatagttatatagaggaaacatataaacttatcttggaaagacggtattttatctcatattaaaagtaagtaaagattagataggtttagtggcactaaataaacaatttgtaacaaaaatagagaggaatatgactacatttcactttatgactgtaatgttacacgaatgttacaaacgtgaacttagtgaaaaacgcattaaataaaggtttttgagggttatcataaaaaaacgtaaaaaaagtgtaataaattttacgtaattatattgcaacgtaataatagttatgttacattaatgttacaaacgttacgttatcaaatttaatgtaacgttaacataaaaactatgaaataaacatttcttagaaattacatatagataacttataaaaagggaggataaatgatatgaaagagcaagtattacaagtaacaaaaggtgacttcgtaggatcagcaagtggagcagtagtattaacagcgttaatcgtatttctatcaagcgtattagtataatagaagctttgtaacaaaagaaaaagaagggagaatgaaagatatgaaagagcaggtattacaagtaacaaaaggtgacttcgtaggatcagcaagtggagcggtagtattaacagcattaatcgtatttttatcaagcgtattagtataatagaagttttgtaataaaagaaaaagagaggagaatgaaagatatgaaagagcaagtattacaagtaacaaaaggtgacttcgtaggatcagcaagtggagcagtagtattaacagcgttaatcgtatttctatcaagcgtattagtataatagaagttttgtaataaaagaaaaagagaggagaatgaaagatatgaaagagcaagtattacaagtaacaaaaggtgacttcgtaggatcagcaagtggagcagtagtattaacagcgttaatcgtatttctatcaagtgtattagtataatagaagttttaaattaaacaaaaaaggaaggagaatgagggatatgaacagtgaacaagtgtttcaagtaacaaaaacagatttattaggatccttaggtggagcggtaatattaacatcatttattctattccttgcaaatgtattagtatgagatatataaatacaatcattcaaaaaaaataaagactctaacgtattagtaagtagttaatatgttggagtcttttttatattcttcttatataccctcaagtattaaagttacctcattatccagcattcatggctaattaaacgctgcggttgaaacttgattcaacgaataatcaaaaagccactgaataaaatcccgctttatttcaaagagaaaaaagtcgaattttatatgtaagaaaaaaagaggaatttgacagaaaagatagaaaattttaaaggtcagaatttgttagcttgctaactaatttctattaattaatgttggaagcgttttcggttggttttaagtatggaccatttaatctatttacagggggatgaagatattatgaaacaaaaatctatggatacgctagctgcacaaatggaggacttttttccagtacgtgatgtagatcatttggaattttacgtagggaatgcaaagcaatcgagttattatcttgcgagagcgttcggattcaaaattgtagcttactctggattagaaactggaaaccgtgaaaaggtatcttatgttcttgtgcaaaaaaatatgcgtttcgttgtgtctggagctttaagtagtgaaaatcgtattgcagagtttgtaaagactcatggtgatggcgtgaaggatgtggcactacttgttgatgatgttgataaagcatactcagaagcagtgaaacgtggtgccgtcgcaattgctccaccgcaggaattaacagatgaggacggtacattgaaaaaagcagttattggtacgtatggtgatacaattcatacgcttgtagagcgtaaaaattataaaggggcatttatgccaggattccaaaaggtagaatttaatattccatttgaggagtctggtttaattgctgttgatcatgtagttggtaatgttgaaaaaatggaagagtgggttagttattacgagaatgttatgggctttaaacaaatgattcattttgatgatgacgatattagtacagagtattcggcgttaatgtcaaaagttatgacgaatggaagtcgtattaagtttcctattaacgaaccagcagacggaaagagaaagtcacaaattcaagagtatctagaattctataatggagctggtgtacaacatcttgctttattaacaagtgatattgttaaaacagttgaagcgcttcgtgcaaatggggtggagtttttagatacacctgatacttattacgatgagctaactgcacgagttggaaaaatcgatgaagaaattgataagttaaaagaattaaagatcttagtagatcgtgatgatgaaggttacttactacaaatctttacgaaaccaattgtagatcgtccgactttatttattgaaatcattcaacgtaaaggttctcgtggatttggtgaaggaaactttaaagcgttattcgaatcaattgaaagagaacaagagcgtcgcggaaacttataagatttgtatccaccagcaaaagtccctttgctggtggaaatttcatttttataaggaggaatcaggatgaaatttgttacatttcgtcttccttcaaaagaactacgggctggatggcttgaaggtgacaaagtaatagatatgaatcttgctagtgaagggaaaatcccttcttctatgatagattttttagagaaagcggatgagtatgtagaagtagtgcggaatattaagaatccaaataagggtatatatgctttagaagaagtacaattgacagctgctcttcctaatccgagtagtattcgagatttttacgcatttgaacaacatgtaaaaacagctcgtggacgaagaggattagatgttgtgcctgaatggtatgatattccggttttttattttactaatcatcgtgctgtaattggttccggtgattttgtaattggtccgaaaaagtctaaaaagcttgattatgagttggagattgcttgcgtaataggaaaagaagggcgaaatatttctcgtgagcaagcagaggaatatatttttggttattgtattatgaacgattggagtgcgagagacttacaagcaacagaaatgaaagtaggtctcggtccagcgaaaggaaaagactttgcaacttctttaggagcacatctcgttacgaaagaggaattagacgtttatcgtaatggtgatcgatataatttagaaatgactgctcatgtaaatggaaaactattatcaaaaggaaacttccaagatatttactatacatttgctgaaatgattgaacgtgcttcagaggacgttacgttatatccaggagatgtgattggttctgggacagtaggaacaggatgtattttagaactgggtacagaagagtggctacaagatggagatgttgtagaactgtcgattactggtttaggtacactacgtaatacgatcaaaaaagaaaaggaagcgggtgatgggcatgttttatcgtcacatgggagaactacctcataaacgacatgtacaatttcgtaaaaaagatgggtcgctttatcgtgaacaggtaatgggaacaaaaggtttttctggtacgcagtctattttgtatcatcattatatgccaacagaagtaggtcattctgcattatcgcattcttgtcagttgcagtatgaagaggatgttgctctttctcatcgccactttcgaacgaaagaaagtaaaaaaagtggtgatgcaataagtggacgtaatttcatacttggaaatgaagatttgttaattggagtagtgagtccaacagaaaaaatggattatttctatcgtaatggtgatggcgatgaaatgttatttgttcattatggaacagggaaaattgaaacgatgtttggaacgattcactatagaaaaggcgactatgtaacgattccaattggaacgatttatcgtgttattccagatgaaggagagactaagtttcttgttgtagaggcaaatagccaaattacaacgccgcgtcgttatcgaaatgaatacggacaattgttagagcatagtccgttttgtgaaagagatcttcgtggtccagaaaaattagagacatatgatgaaaaaggcgagtttgtcgtaatgacaaaatcaagaggctatatgcataaacatgttttaggacaccacccgttagatgttgttggatgggatggctatttatatccgtgggtatttaatgtagaggattttgaaccaattacagggcgcattcatcagccaccgccagtacatcaaacatttgaagggcataattttgttatttgctctttcgtaccacgtttatacgattatcatccagagtcaattccagcaccatattatcatagtaatgttaatagtgatgaagttctttactatgtagaaggaaactttatgagtcgcaaaggtgtggaagaaggttctattacacttcatccgagcgggattccccatggaccgcatccggggaaaacagaggcaagtatagggaagaaagagacgcttgaattagctgttatgatagacacattccgtccgcttcgtattgtaaaacaagcacatgaaacagaagatgaaaagtatatgtatagctggattgaacaaggttcatatactgtgaaataagtaaaaaaggcatgctctcaataaggggggcatgcctttttcacggaatcgacatgtataataataccaaaaaaataatggaaagatatatagaaagaataataaggatcgtgcatattcagaagaatttctacttgtttcgacaaaagtattgactaggaaaagcgtaatgagtaaaataaaaaagcgaattaaaaattttcagaaaatttaaaacttggaggagtgaaagatgaagcaaatttttcaaaagaagccaattgcaaagttaatgcatgaaagtaagcaaaaaacgttagcaagaacattgggtgcgctagatttaactatgcttggaatcggagcaattgttggaactggtatttttgttctaacgggtgttgtggcagcgaaacattctgggccagctattatattatcatttgcgattgccgcgttagcttgtgcctttgctgcattttgttatgctgaatttgcttcttcagttcctgtctcgggcagtgtgtatacgtatacatacgcgacgatgggggaagtgttcgcatttttaattggctgggacttaatgcttgaatatttacttgctacatctgctgtagcaaacggttggtctgcatattttcaatctttattaaaggggtttggaattcacattccgactattctctcctcggctcctggtacaggaaagggtggaataattgatttacctgcagttctaattattttagtgatgacagttcttttatctaggggtgttcgtgaaagtgcacgagtaaataacattatggtatttattaaaatagcagttgttcttatttttatctttgctggttttaattatgtgaaacctgaaaactggacgccctttatgccatttggtttagatggtgtaatggctggagcggctacagtattcttcgcatttataggatttgatgcagtttcaacagcggcagaagaagtgaaacgtccgcaacgtgatttaccaattggtattattgcatcgttattaatttgtacagttctttatatcgttgtttcgcttattttgacagggattgttccatacggccagctaaatatatcagatccagttgcttttgcacttcaatttattggacaagatggtttagcgggggtaatttcagtaggagcaattacaggaattacaacagtaatgctagttatgatgtatgggcaagttcgtgtttcttatgcgatgagccgagatggtttactgccgaagcgtcttgctaaagttcatccgaaatttaaaacgccatttttaaatacatggacaacggggattattgcggcactgatttcaggattaatagatttaaatgttttagcacatcttgtaaatatggggacattgtcagcatttgcacttgtagctgttgcggtaatcgtaatgagaagaactcatccagacttaccaagggcatttaaggctccgcttgtaccatttttaccagcattaacagtgattttctgtttatacttaatgcttcagttatcagggacagcgtggattagttttgggatatggatggttattggtatagcggtttacttcttatatagccgaaaacatagtgctttaaataatagtaaaaaagaagaagatgttgcaaatttataagcgaaaaaatccattctaattctgttagaatggattttttatttgaaaatttacatttttctgaacttgttataagataattgttggctaactaaaggggtggaatgatgaaaaatacgtggcgtgagttaagggagatggaccgtaacgtatggattcgatttattggagagacgttaaatggaattgcaatgatgatgttaatgcctttttttgcattatatttaaaagataaggtagattcgttgttggaagttggggttattatggcgctttctccaattgctgcaagctttggatcacttataggagggagaattgctgacatatatggaagaaagcctattatgatattttctatggcaagtaatgcattattaatgctcggttttctatttatagaaggatttattccatatgcaattttatctatttttttagggttgagtaattctttatttcatccagctgcatcagctatggtcgcggatgtaacggcaccagaaaaaagaacagaggcatatggtttattacgaatgggacacaatataggtgctgcgattggtccgataatgggagcatcagtagttgtgttgtcaaagaaccttgtgtttattattgcctcttctacaatgctattttatgcgttacttgtattacttcttattcaagagacgatgccaaagagcatagataaggaagaacataaagaaaaggaatctggggcagtttggaaaattgtaatgcgagataaggcattaatgatttacttattagcaggtattatcatttcgatggggttttctcaaacggaaggcatgctgccactacattttgataatgaaatgaagcgtatttttggaacgaataatccatatccatatttaatggcgttaaacggactattagttgttttattccagtttcaaatttcaaaatgggctacggataaaccagttgggaagacgatgttatatggtgcatgtttattcgggattggattattttttatagggtggttaccgaagtggtttggagaatttaatacaaatgctacaattattttaataacactactgttcgtttatgctatatatacgttaggtgaaatgattatgtcgcctgtacagatgacatttgtagcaaatttggcccctgagcatttgagagggacttatatgggagctgcaagtttgcagtggattacaggaagcgcatttggcccacttttgggaggttttttattagatcggttacttggtcaccttctatttacaattttagctgtaggatgtgtagttgcaggtattgtatatgtttctttagatcgccttgttgagcaaaggcaaaaagacacactaaccaaacaatcttcttagtgaataggtgacatacacaaaaaaggggatttctacatattttaggtacataactagattagattgccattttattttgtgtacctatatagaaaatgaaatgaaaaaccaataagtgatgttatttaattatttatggaagttacattttatttcaaataggaactacctatttttataaaaagtgctaaaatagaaaaatgaaaacaattggttagggtgatttcattgacgaaaattaaattaggtttattatatggtggaaaatcagctgagcatcaagtttcgctacagacggctcttgctgctattaaagcgttaaatcaagataaattcgagattcatccaatttatattacagaacaaggtcaatgggtacgcggtgagcgtattgaaggcgaagtaacagatgttgaagctttaaaaatgagcggtgcagaaaatgcgatttctccgttatcattaagtacagaaattatcccatctgcagcttctgaggagaacgctattgacgttattttcccattactacatggaccaaacggtgaagatggaacggttcaaggactattagaattaatgaatatcccttatgtaggaaatggtgttctagcatcatctgctggtatggataaagttgttatgaaaaacatctttgcagaggctggtttaaaacaagcaaaatatgcatccttcattcgtagtgcatgggagaaaaatcgtgaggaagcttattctaaagtagaagataagttaggatatccttgcttcgtaaaaccagcgaaccttggttcaagtgttggtattaataagtgtaaaaatcgtgaagaacttgaggatgcatttgtagaggcattccaatttgatcgcaaaattattgtagaagaaaatattgtaggtcgtgaagtagaagttggggtactaggtaatgatgagccgaaatgttcagttgtaggtgaaatcgttccgaaaaaggacttctatgattataagtcgaaatatatcgatggtgatacggcgctaattattccagctgaaatgacagaagaagaatctaatgtaattaagcgtgatgcgattattgcattccaatcattagacggtgcaggtttaacgcgagctgatttcttcttaacgaaagatggagaagtgtatattaacgaagtaaacacaatgccaggatttacaccgttcagtatgttccctctattatggcaacatactgggttaccgtatccagaattaattgaagagctaattcgtttagcgattgaacgtcacgaagaaaaacaaaaaattaaatatacaatctaacaaaaaaggaggaagcactattcgtaggaatagtgcttcctctatgtaaggagcgtttctatatgataaagcgaatgttaaagcaagtggaacagatggtaaatggtactggattagcagagcaatatgagggaattactattcaaggcgtgtctattgatacaagaaaaattgaaaaaggaaacttgtatgttccgattcaaggggagcgcttcgatggacatgcttttgtagataaagctgttgaaaatggagctgtggctacattatggatgaaagatgtagcgaatccacctgagaatcttccggttatttttgtggaagacacgctatccgcattgcaaatgttagcgaaaaactatcgcgatcaattggatgttaaagttgtaggtgtaacgggtagtaatggtaaaacatctacgaaagatattgtaacaagtcttcttgcgactaaattcaaagtgcaaaaaacagaagggaacttcaataaccatatcggattacctcttaccattttaaacttagaagaaaatacagaagtagcagtattagagatgggtatgtcaagccgaggcgaaattgaattcttatctaagttagctcgtcctaatgcagctatcattacgaatattggtgaggcacatttaatggatttagggtctcgtgaggcaattgctgaagcgaaattagaaattgttacagggttacaagaaggtggcgtgttcgtatataacggagatgagcctttattaacgaatcgtgttcctgaaatgaatttagcagcagaaacggttacgtttggtgatgcaagagcaaacgattattatccaacgactgtaacattacaagcaactgggacacatttcaaaatgaatagagatgaaaatatttcattctacttacctgtgttaggaaaacataatgtgtataatacacttgcttcaatggcaattgcgaaacattttggtgtaacgtgggaagagatgaaagaaggtttagtaacacttcaaatgacgggcatgcgtatggaaattgtgaaaacaaatagtggtttaacaattatcaacgatgcttataatgcaagtccgacggctatggaagcagcattccatttaatgaatggtttagatggttttgctaaaaaaatcgttgtgctcggtgatatgttagaacttggagatcaagaagtacagttccattatgaggtaggaaaattaatcgatccagcaaaaatctcgcatgtattcacatacggtagattaggggctcaaattgctgaaggagcgaaaattaatttccctaatgaacgtgtaaaggcgtatgataataaagaagagttagtaaaagatttacaagcagtagtcgatgtgaaagatgttgtattaataaaagcatctcgcggtatgaaattagaagaagtaattacgatgttgaaataattggtgtatataaatagggatgatagttacgaaaatagaagaaacttataataagcgcttacagtaaatataaaaaaataaaagtgaagaaaaaaactctgaatatgaaaataaggtaacagttgggtttgctttttacacatacaaaacttataattgataaagtgtaataacgtttagaagtattttcgtgaagaatatacgcccgtttatatacgtgagcattcaggaaaagggcttttccgcaaattcggaaaacgcctttttttaaatgataagtataggatagaaaaggagaagtaacattgacaacatttcgagaattaggattaagtgattctttactgcaatctgttgaaagtatgggctttgaagaggctacaccaattcaagctgaaacaattccacatgcattgcaaggtaaagatattattgggcaagcgcaaacaggtacagggaaaacagcagcattcggattaccactattagataaagtggatacacataaagaatcggttcaaggtattgttatcgcgccaacgcgtgaattagcaattcaagttggagaagaattatacaaaattggtaagcataaacgtgttcgcattttaccaatttatggtggtcaagatattaaccgccaaattcgtgctctaaaaaaacacccacacattattgttggtacgccgggtcgtattttagatcatattaaccgtaaaacacttcgcctgcaaaacgtagagacagttgttcttgacgaagcggatgaaatgttaaacatgggcttcattgaagacattgaagcaattttaacagatgtgccagaaacacatcaaacattactattctcagcgacaatgccggatccaatccgccgtattgctgagcgtttcatgactgagcctcaacacattaaagtaaaagcaaaagaagtaacaatgccaaacattcagcagttctatttagaagtgcaagaaaagaaaaagtttgacgtgttaacacgcttattagatattcaatctccagagcttgcaatcgtattcggtcgtacaaagcgtcgtgttgatgaattatcagaagcattaaacttacgtggttatgctgcagaaggtattcacggtgatttaactcaggcgaaacgtatgtctgtattacgtaaatttaaagaaggttctattgaagttcttgttgcaacagacgttgctgcacgtggtcttgatatttcaggcgtaacgcacgtatataacttcgatattccacaagatccagaatcatacgttcaccgtatcggtcgtactggtcgtgcaggtaaaaaaggtattgcaatgctatttgtaacaccacgtgaatcaggacaattaaaaaatatcgagcgtacaacaaaacgtaaaatggaccgtatggatgcaccgacacttgacgaggcattagaaggtcaacaacgtttaatcgctgaaaagcttcaaagcacaattgaaaatgaaaacttagcatactacaagcgtattgcagaagaaatgttagaagaaaatgactctgtaacagtagtagctgctgctttaaaaatgatgactaaagagccggatacaactccgatcgctttaacatcagaaccacctgttgtttcaagaggcggcggttctaaaaaacgcggcggtaacggaggcggataccgtgatggtaaccgtaatcgtagtcgtgatgcacgcggcggtggcgatggacgtaatcgtgaccgtaaccgtgatggacgtaatcgtgacggaaaccgtgatcgcaatcgtgatggtggtagtcgtggtcgtagaggtgaaggccaaggtcgccctggttcttcaaatggacgcggcgaaagaaaacatcatagccgtccacaagcttaataaaaaaagagaatgccctttgcgggcattctctttttttatttctataattgtgcatactacataatagttatgatagaaaaggggctgttatatgcttgtaaggcttggttacgttgcgatgagtgtacatttgaagaatgcatctccatctcaaacgatgacgtatgcacagtttcagaaattaaatgatcgtgctgctgcaattcgtaaacttgaaagaattgctaattccaatttagaaaattgtttacgtttattaaagcataataaagggcatgacatatctttctttcggctcagttcaaagctcattcctttagcgaatcatgaggaattgctagagtggaactatattcgtcctttaaaagaaaatttaaaaaaactaggtgaatatgcagttcatatgaatatgagaattgatttccatccagatcattttgttgtactaaattcacctgaggagagtgtttttaaacaatctgtaaaaacattgcagatgcacaaaaaattattaaaaggcatggggattgaacataagcaacgatgtgtactgcatgtcggaggaggatataaagataaagaacttgcattagagcgctttatagagaagtggtctaatgtcccaaggggtattcaagaaatgattatattagaaaatgatgatacaacctttacgttagaggaaacattatatttaggagaaaaattagatattcccgtcgtatttgacttgcatcaccatatgatgaataatgagcaagaagattggtatgaagattgggcacgtgtcgttcatacgtgggaaacgtctttgttgccggttaaaatgcatatctctagccctagagagggaaaagatccaagagctcatgcagattatattaatgtagaggcatttttatcttttttaagaaggataaagggaagtgttccgcaaattgattgtatgattgaggcgaagatgaaggatgagtctttatttcaattaatgagagatttaagtgaacaagtagatgtagaaattatcgatggtgcaagcttttatattaaataagctttgcaccatcgttttttttggttaaaaaaggggttaaaatgccaccggttattaaacctgttaaatgactgatcggattggcagaagggttaaagaaagtaaatagtagtaatagaagaatcataattgagaaaatggcaatttcttttggttttgaagagcggtattgattgtacaataaaaataactgtgcacctaatagtccgaaaataccacctgatgcacctgcgtgaatatattcaagcggcataataatataagaagaaatatttccagaaattccagagagaaaaaatagaataaaaaaagaaaagtgtccgagttgcttttcgatagaagaaccaagagcaaacaaaaaaatactattagaaagaaaatgttgtaagtctacgtgtacgagaagagaagttatgacacgccaccattctcctttagcgatatattcattagaggctgccagtggtaagagaaaaaagtcgcctaatatcatcatgactaaatgaataagaagtaaggtaagaatagtcggttgtaaagaaatatgagtggatcttattagcatacggttactttcaccccttttgcatcagaaagattctctgttattcttatcaatatgaaagaagaaagttaaatagaagaaggggatttcgaaatgattatagggattggtatcgatattattgaattaaatcgtattgaaaaaatgctagatggaaagcttaaatttatggaacgtattttaacggaaaatgaacgtaatgttgctatggagctgaaaggaagtcgccttacagagtttgtagctggaaggtttgcagcgaaagaggcgtattcaaaagctgtaggtactggtatcggaaaagaagtgagttttttagatattgaagtgaaaaatgatgaaagaggtaagccaattctgattacaagtacagagtatattgttcatttatcaattagtcatagtaaggaatttgctgttgctcaagttgttttagaaagctcgtcacgctagtctgcatattttatatctttgtctcatatatttgaggtagcgataaggaaggtacatcttccattcatttataggggcaaaggggctgaattgatgaaaaggcgtctgtttttagttcttgtcggtttgttgaccgtttttgtgttggcgggttgtgtggaaaagaagcaagatgatgtcgtgagagatttagaatcaaaagtaaaagggatgaaaagttatcaagctgaggcaaaattatctattaaaacaggcaatgagcctcaagagtataacgtagagatttggcataaggaaccgtctttttatcgtgtgaatttaaagaatgcaaaaaaagatcagagccaaattattttgagaaatgaagaaggtgtatttgtattaacgccagcacttaataagagcttccgttttcaaagtgattggccgcaaaatagtagccaggcttatttatatgaatcacttgtaagagatattttgcaggacaagaaaaaccttacttttgagaaaacagataagtattatatttttaaaacaaaaacaaactatcaacatcaaaatatgttgccgagacaagagattacattgaataagagcgacttgactccagtttcagtgaagttactggataatgatcaaaatgttcttgtgaaagtagatttctctaaagtgaaattcgatgcgaaatttgataaaggtgcatttgatacgaaacaaaatatgtctagagcacaggtagatgttcaaacaacagcgaaagaagacaaaccgtttgctattttgtatccacttgatacaccacaaggtatgactctgaaagatgaaaaagagttgaagacagacagtggcaagcgtgcgatactcacatacactggaaataagaaatcctttactttaatacaagaaaaggcaaaagttgcagaggcatcatcagcggtaagtgtaagtggagaaccagttgatcttgggtttacgattggtgcattgacgaaagactctgtaacgtggtcgcataacggagtagaatatatgctcgtgtctaaaggtttagagccgaaggagctgttaatggttgctcgttcagttacagcgaagcaggtgaagtaaacttcttagacgtggtgatatatgtgcaccacgtcttttcttagtttgaaggtggatttcataaaagaagcatataaaagaataagcttcgcatatcgtgtataaggaagtgtatttatggaagaagcaccattttaccgtgacacttgggtggaagtggatttagatgccatttataacaacgttacacatattaaagagttcatcccaagtaatgtagagatttttgctgtagttaaagcaaacgcatatgggcacgattatgtaccggtggctaaaacggcattagaagcaggtgcaacaaggttagctgttgcttttttagatgaagctttagtgcttcggagggctggtattactgaaccgattttagtgttaggtccctcgccgccgcgtgatgtaaatgtagctgctgaaaatgatgtagcgctaactgtttttcaaaaagaatgggtggaagaagcaattaaactttgggatggttcatctgtaatgaaattccatattaactttgatagtggtatggggagaattggaatacgtgaaagaaaagagctaaaagaatttttaaagagtttagagggtgcaccgtttttagagttagaaggagtatacacgcattttgcaacggcagatgaggttgagacttcgtattttgataagcaatataacacgttcttggagcagttaagttggttgaaagaattcggagtggatcctaagtttgttcatacagctaatagtgctgcgacgttacgttttcaagggattacatttaatgcagtgcgaattgggattgcaatgtatggattatctccttctgtagaaatacgtccttttttaccatttgaattagaaccggcgctatcacttcatacgaaagttgctcatattaaacaggtaattaaaggtgatggaattagttataacgtcacctatcgaacgaaagctgaagaatggattgcgactgtagcgattggctatgcagatgggtggcttagaaggttacaaggatttgaagtgcttataaatggtaaaagggtaccgattgtagggcgagtaacaatggatcagttcatgattcatcttccttgtgaagtgccacttggtacgaaagttacgcttattggaaggcaaggagatgagtatattagcgctacagaggttgcggaatactcagggactattaattatgaaattattgcaacgatcagtttccgtgtgccaagaatatttatacggaatggtaaggttgtagagataattaattacttgaacaatatatagaaggtagtatgattgcttcttgtcattggagtgactgttcattgctggataataagctctttttgatgagaagctttttacttataatcattttttatataagttgcacgtaagttttgaagaggagttctattgtttttagttagttatgagataaaaaatttaagaagatgaatgttttgtttgtgaattggaaaacataagcaaggaataaggaagtctttgcaacaggctccatacaatggtattattacaataggtgtcatatatatatttgggtgtgtagttgacggtggaggtgtatttttgtgtccgaatcaagtgtaactactgaaatcgtggttcggttgccaaagcaaatggtaacggaattggacggaattggaaaacaagagaataagaatcgccatgaactaatttgccaggcaacacaattgttattgcgtcaacataagacgaagaaacgctaccaacatgaatcaatgcgacgtgggtacattgaaatgggaaaaattaatcttggtattgcatctgaagctttcttagcagagtatgaagcagctcatacagtagaacgcttagttagcggggggtaatattttgattgtaaaacgcggcgacgtgtattttgcagacctttccccagttgttggttctgagcaaggaggcgttcgtccggttcttgtcattcaaaatgacatcggaaatcgttttagtccaacggtgattgtagcggctattactgcacagattcaaaaagcgaaattacccactcatgtggaaattgatgcgaaaaagtatggttttgagagagattctgttattttacttgagcagattcgaacaatcgataagcaacgcttaacggacaaaatcactcatttggatgaagtgatgatgagtcgtgtagatgaagcgttacaaattagtttaggactaatagatttttaaatcggcagtttaagttgctctctttgaagggcaactttttttattatagaggaggttacggttgtatatggaaatggtagataatcgacaagcgttaatgaaaatgttagtgaaagaattaggctttaccgaaaagcaagttcgtcatgttattcaattaacagaagaaggtaacacagttccatttattgctcgttaccgaaaagaatggacaggctctttagatgaggtgcaaattcgtacgattttagagagatggcaatatatgatgcaacttgaagataggaaggaagaagttcttcgtcttattgatgagaaggggaaactgacagaagagctacgacagcaaattgttaaagctacaaagttgcaagaagtagaagatctatatcgtccatataaagagaaaagaagaacgaaagcgacaattgctaaagaaaaaggattagaaccattagctgaatggttattgttatataagaaagaagatccggctaaaaaggcagtggaatttattaatgtagagaaagaagtgcaatctgcagaagaagctttacaaggtgcacaagacattattgcagaaatggtttcagatgaagctgcgtatcgtagttggattcgaaatgttacttttagaaaaggtgttatgtcttcgtccgtgaaagatgaagaaaaagatgaaaagaatatatatgaaatgtattacagttatgaagaaccattgcaaaaagtagtaccacatcgtgtattagcaatgaatcgtggcgagaaagaagatatattgagagttgctgttgttccgccagtagatgagatagtaacttttttaaataagaaagtaattcgtgataacgattcgaaaagtgcacattatgtacaattagcgattgaagatggttataaacgattaattcaatcttcaatcgaaagagaaattcgtaaagaattaacagaaacagctgaagaacaagcgatacatattttctctgagaacttacgtaacttattattacaacctccgatgaaagggaaagtcgtgctagcggtagatccggcatatagaactggttgtaaattgtctgtagtagatgatacggggaaagtactacatatcgatgttatttatccgcatccacctgttcgtaaatatgatgatgcaaaaacgaaagttctttctattatagataaatatcaagttgaaatgattgcaattggtaatgggacagcatctagagaaacagaagagtttatagtagatgtattacaaagtgtgaaccgagatgtcttttatattattgtaaatgaagcgggtgctagtgtatattcagcttctgatttagctcgtgaggaattcccaaatttacaagttgaagagagaagtgccgtttctattggaagacgtctgcaagatccacttgctgaacttgtgaaaattgatcctaaatcagttggggttggacaataccaacatgatgtatctcaaaagagactgaatgagtcattaacatttgtagtagaaacagctgttaaccaagttggggttaatgtaaatacggcttcggttgcattgttacaatatgtttcaggtttatcgaaaactgttgcgaaaaatattgtggcaaagagagaagaagatgggaaattcacgaagcgcacggaattaaagaaaatcccgcgtttaggtgcaaagacgtatgaacaatgtataggtttcttacgtatactagaaggagcgaatccattagatcgaacaggtattcatccagagcaatataagaatgttgaattgttattgaagagtctagggttatcgatagatgacgtaggacaaccgcaattacaaaagagattggaagaagtagagatttctaagttatctcaagaaacaggagttggggagccgacgttagttgatattatagatgcacttattagtccagaaagagatatgagggatgagttgcctaaaccacttctgaaaaaagggattttgaaattagaagatttaaaacgtggtatggaattagaaggaacagttcgtaacgttgttgattttggtgcttttgttgatgttggcgtaaagcaagatggtttagtacatatttctaaacttagcaaacagtttgtaaagcatccgttagatgttgtatcagtagggcaaattgtaaaagtatgggtagatgatattgatacaaaaaaaggacgcgttgcactatctatgttgccgattgaatagtaagagaagagagcagatgaaactgctcttttttttatggaataaaaagtgtaatggattatgagctttgatgtattttgctataataaaaccagcattcatttaataatttaatttgataccggtttttttcgaaatatgcacgttgcatttgtttttttagccacgtaggcataggaatccctccttgtttaatcctgctctcaaaaatctaaaatgctattgatgagaggttggtgagtggatttctattcatgttttgtttttagaaaccacgcttcttacatgaggatgggtatatgtactatttaatatatgtataagaagggagaaaagtgtaaaaatatttttttgtttaggaggaatgagagtggatgagcaagaaattcagcgactagtggaagaagtgtcactacaatactttgagatgccgttcttacataaagcagtgtttaacaatagattacgtacaactggtgggcgttatttattgaagagtcataatatcgaactgaattatcgatattacgaagtgtatggtgaagaagagttagtcgggattattaaacatgagctttgtcattatcacttacatattgcaggaagagggtataagcacagggacagggatttccgtgagttgttaaagaaagttgaggcaccacgtttttgtaaacaaatgattaatgaagagaaggaaaaaaagatttataagtatgaatgtatggagtgttcacttcaatatgtaagaaggcgtcaaataaatacaaaaagatatgtctgtggaaagtgtaaagggaaactcaaaccgatatcgaaaacatcttgacagtaaaaacgcaatccagtatattataaacatgtcacgtttgaacaagatgttgttaaaaacttcttgacttacagagagaatttttataagatacaaattgtcttcattattccgcagtagctcagtggtagagctatcggctgttaaccgatcggtcgtaggttcgagtcctacctgcggagccatgattttgtacatgcttaaacaagcgaaaatgtacatgtttatcttgacatttacacgcacgtacatatctattaagtcatcaaaggtcacatctttttgtgggttatgtagttttaataaataaatatgttgcttaaggtggttccgttgtgcttgttcaaagaatgcattattagattccgacagaccctggataaccattgcaaaaacctcggctactttatcaactggtccacgtaaaatattaatgtttttggtatcagggtttgtgggatcaatataataaattgaactttcaggaatcttgtgtgcttgtactaacttaaataccttttgacataaatcattactcggttcaataacagttatcccatttaaaaatgttccttttacttcttctgtatcataattattctttttatacgtattttcaaacttatttataaaacgtaccatccagtgtaaatcttgattaatcattggaataattaaactagatgtcttaccagaaccaataggaccaataataattccatttagggttctatctttccccttgattcgaatcatttctttgtgcttaatatgaggacctatatcaacatcaggatgtatttgttcctcttggctattaaaccacttttgcaacttatgatttttatattcgtatttttgtacccactttaagatttcttctctgtaacggataatatggccactataccaaagagtaaacaaaatcataaatacggtcggtaagaatacaaatatcatggtgagtgtatggaaatttcctgttaatacatcccctattgcttgatattcaccaaaattaacatgttttgctttattcataagataaggaataactttcgcatggataggagtagttgcaaaccataaaaactgaatatctactgcaatatgagaagcaattaaaattaataacttgccattttgaaattgtaaagctgggatacggctgtagaacctaaaactaaattctcctaatagcaaagagaagaacattaaaaatagtggtacatatgtaatttctataggataagacggtggttcaaatgcatagtagagtaactggatgtagtttgctacaccaaatccaaatgaaaggataaatccgctaattaaggcgattgtagtgtataatggtaatctttgcttagatctctccataagggttcacctactttttaaagacatagttgagctttatggtgtaatgtaaaacgattatgaagttctggcttgaattgttcctttgatttttttagaaagaacttcgctgcatcttcagtttgttttaaatataagtcaatactatctccttcacacaattggttatattcttcttgagaaagtactgcaatatttatctctagtttgttattcgccgcagtttcaattattacatcgtaccaataataattaggtttccctggaattttgatatcttgtagggaaacgcaaaatttagctcccccttctgtaatatgtttaaggactagttctggagttttaaatgcttctcttgctgagagcactcccccagtagttgttgcaaattgtaagttcattgtcattttccacttccacctttctccatacaaaaaaaggcaagcgacacccactgtaaaaacagcgtgtgtcgcttgccttaatttcatatgttctgatttgattgtagttttgagtgtttagttcaaacgttattctatcaccttaaataataaaaatcaataaagttatataaaagtatataaaaaataaacgattaatataattctacaagtttacgtcttttcggattaacgttatttgcagcatgtaccatgatctgttcatcggttgctatatttgtattttgaatggatagaagtagtacattatcataagtgtccatcagtagaatatctctaggattttcacgtttaggatagataactacaagcggaatgccttcatctccattccttcttgaaaacacgacatcatctaatcttgcaatcattcggtaatcattttcatttccaaaaataaaaaagaaatcttgaatagaagctttatctctcttgtatgtgcgtcgaaggccaccatctattgattctttaaacgtttgaattttttcgacaaaagtgtaacgccaattgacatctcctactgtacgttgagataaaggaaaaagaatatcttgttcccagttttgattatcatctgttcctagaatgatatctgaaataacatccccagcatctttcaatgagcaaatgtgtacatttagatttggtatattcattaataattcatgatgcttccgcatagaaaataatagatttttcatacgtatgtatggcggttctgcatcttcagcaaggaacattgatttgtcgtacataacaaagacaaccgttacatcctcatttgttttttttgcatattctatgtacttctctactttttcaactaaggtagaatttgtctctttgcacatgtccatctcaatatggatatttttatcttggtatgaaatatgttcatcaggaatcaaggccaattggttgccctcaatttttatattttttttctggtaaaaagaacgaatatccaattcatataataattcattggtttgtgtcttctttgtagtcgctaaaaaagtacggatcatgacttcacgtgaacacatagtgtgaagagaagttgttcttgagtaccgtctttttgaacttttttttggaattcttcctatttccaataagaattcaattgtcttttcttttaaggaaaataaagcgcgtttcgtaatactatcagcccttttatctattcttttagttagcatagctccatattgtgagtaacggtcaagctttgtaaatatgctagcttcagaacagtctcttccctcaaatgcactatataactgcgtgatttgccttgttgtaagtgctcttttgtaatataaaactgtaaagacaaatatgtcagcttcttttaagtgaaaatgtttttgggtacctgatcttctatatttatacactttttcggacaatgcatacacctcttatattgaattaaactaaattaaatacttattatttttaatatactattacattgatgtggtggttgtaaaacccgaaaaaataaataagacattttaatttttagagatacttcattttgtacgttgaagttgagatgaaaactactcttataaatctcttataaattattgatttataaggctttattaaatcgtttgttttgttaggacgagctactactagatacctaacaatagttataatgatattctatttataaaataatgttatgacgtcctaacatttattagatagccaaactactattttaattgattaaaattattcaagatttataaaaaggtttattgataataaagagtaattttttctatccttaattcgaaattcaactttttatttgtgatgaaacgctcttttcaacttctgctatttgctcaatctaaaattccaactttttcttttatgttttttcttgtatagaatcataaattcacttagacaaataatattaattgtttctaccaaatcataaataagttaacaatatgtctatagatacttaacatattggttttagtcacttgaattaccttcactttttcttcgttaaacaaggagttatcttaactgaaataataaaattgaacagttgttaattttatgtgaggttgtaattgctatcatcattcctcctgcattacaaaaaaattattgtaatgtaagtatcgctttgatgttaataagatgagatttcctttttaataatctagtttgaacaaatgtttcttttttatagtagagatgtgattgttagcctactacttttagaatgtcaaagttgatttatcctagtcctccctttttaatatgtagaatattgagggtattgatgctgttcatatgaaattaacaacctcttctactggcttttgaggaatgaatgaaattgacaaggaattgaattcaaatgaggaaaagaggataatttttcttataacatatataataatgtgaactaacaagtactaagtgaagaacagtacattaacataacattaacaatgagcggtcttataagtgataaatcccgttaaaacagctaggtaacaaagaaaaccttagtgtgaattgctataagaatgtcttgaaatctccctagtaatataaatacactcgaacaatatttattattggaatatttaaaaagtttagttgaattatataagctttacaaatacggtttacatacaaattttatataagagtcttatataaaatttgtatgtaaactagataatttgtttttcgatttaactacgatataaaagcattatactatacacttcatatgtaaagcttatatataaggtgtataatatttactggaatttttatgctaaaaaaattggtggtttttaatctgttttttagaatttcgatttggtttttttaataatcttttttgaaatgtcaatcacatgaaatttaagattgatataacatgtatacgcattatatataaggcgtatacataaacccttataaaatatatattaattctttttttaattttataagtcttatatacaagtcctgtatataagttttatttataatgacttgatatacgacgtgtaatgatgtactatgtttctaggaataattaaccagtgttttaagggggggacgacttgaacgaagttttaagtgaaaaatatcaaacaatcaagtttgcagatgaagtagtaaacatgtttgctgatatacttgaacaagatgagatactctatagtgtatttctatacataggaaacatagtaaataaacaatttcaagagacgaagtacatgaggggcatatctattaatgaaatagtggaaaatgtagttattgataggagagtaaagaaaaaaaagggaaaatcctattctttagaggttgaacgtacgaatatatctagacgttcagctgaaataagtgtgagtacactatcatcaatgtctttaatctatgaaaaaaccatgcacccatataaatttttgatctcaacttatagagggcaacaagtactgattgagttagggaaaagaaaaaagataaataaggagagataaaataatggcaaaaaacttcttgaagaatgaagtggcagttaaaatgacgatggtcggttttggtcaagctggtactagaatggtagataaatttgcggaatatacacatacagatggtacagcagtatataattgcttagcactaaatagtaatgatggagatctagctgaattaaaaaatgtacccaaaagtaatcaagtttcactgaaattaggtggtttaggtaagaatcctgagcgtgcagtaaaagtccttgattcaaatgaggaagcaaaagaaaagctaaaagaatttattactgaacgagtaagaccttcggatgaacttgttttattttttgcaggtttaggtggaggaactggaacttctacaatcattaaggctattgaagaattttcggcttttcataacaagccagtaatcagacaagaattacaaaaagttgcgcagctatatccaatgtctgaaatcaaggcgaatcaagcgaagtttgcgagaatagcctttgaaaatgctattgagcgcaaagactttattaaaatggggattgttgtaactcttcccgtccgagcagatgggcctgatgtattacgacaagtaaataaattttcacaggaaatttggaaattagcaaatgataaatcaaaaggtgtagcatttgttgtgtttgctgataaccagcatttttacgatgaatttaaggaattgaatgaaaatgagaaaaaaggtattgctaattcacgagattatgcaaatcaacgtattagtgaaattattcatgagttaaataccgctgctaatggatctggtacatctgtaatactggattctcaagattttaaacgtattttacttgagaaaacgggctgtttagtaattaataaggtttcacgtaatatgaatcaaatagaaaatagccatgcaattatagaaatgttccaagaatcattaagaggaagctctttccatcccccgattgatttgatgaagaagaacgatgatggttctgttgaagcatcaaaagtacatcattttggtatgcttgctatcctagatgagcaaaagaatattaatgattcctttatggatgacgctaaggtagaagtttcaaataatttacctataaatggtacagtttttaatggatatttggtaagtaagaatgatttcttaggaactgtatataccttctataaaaccgatgcattaccatcgagattatctaaaggtttagttgaagaatttaatgaatttaaagaaagacaaagccaaattcagtataaaaagtctcaaattagtacgattgaaagtatagatgaggatgaggatttaggttttgcatttggagattttattgatatgggtagtgacgaagaaaataataatgctggagcaaatgaagatgaagatctagcagattttctagatccagataagatgtttggtactacaaaataataaaaaagtctggactaagttccagacttttttattattccactgaatccataagagattttatatactcaataatattatcttgtatgtactgctctatgaagagttgttttttactcaagtcttcctcttttttaaaccagcctgcttttctagtgcgctcttcctcaggtttattattccataagctctctgcttgttttcttaattcctgacgtgccctatgctcaataataaaattatcaagcctatcttggcgttgacgcaattttagcgtttctacatcttctggttgtggtaattgctttaatatactttctaccctctcttcataatgagattcaatatgttttattttttcttctaactgtttagttaccattttttcaataatttcagcagtagcttgaaggtttaattcagtggatacctcatttgtttgatgttctggtgaaactggtcttaaatcaaattggtgtggtaaaaggtcaataattgcatctagagaccatttctcatcccttttctgctttataaatagagcaatttcaagatctaaagcattatagagtttttcatttgtattttgagttcttaaagtttcatgaagtcccttttcttctaggatattgaaccaattataaactgtattatgatgacgtcctactagttttgagaattctgttatccgccatgctttttcgaaaacattatcatctaatatatcatcatcgttaatttgatggtcttgtttttcatttttttgctcaatcattgtaactacctcctcaaaaatcaactcataaataactaattataattaacatgtgagctgagattaacatgttagctagtatttcgataatattagtaaaaatccctaccaatccagtgaattacatgaaatatagaattaacatgtaaacatatacttgttaacagaacattaacgtttagtatagaattcggtgaatcagtaactttattaccaatttgaaatatataattggtaatgttttgttaatgggaatatatatattattgcagtagcgctattgatagttgctatgagattaacaaatcaggctacttaatattaatgataaggaaataaagctattttgtaaataagttataaggatataatccgggtatataacggaaaatacacaaagtaacgcccaaaatctaattatcacgtataaaaactagtaaaaagtaaataatattaatgtagagttagtattgttcaataaacaaaacggtatttaaggatataggagcacaatcataatacttcgaagaggttcgtcctactccctatttacttgccacatacaagttaggatctacttatgtatattaatttagtgtagaatgtacaatttaagttgtatattgcatgtcgtgatagaaatttatgtagtcagtatcaacaaaatgatctttatcagcattaaagaacagattgagcccgcgagttgacattaacatgaaacatgacattgacatgaaaccgacactaaaaccacctactaataacatacgaacacctattgttaatgttttgttaactataatagatatagatcaaccctttgtatacatgttgatctaaaaagattaccttttaacatgaaatgtgaaccataaacgaaggattttatagataattttgaggaagtttttaagatactaaggttcgactcagaatactagaataatccaagtgatgtattttgtagatatccgatttctagtgtgcgtttgcatatattaataagttcataaataagacaatgagattgatatgttaacgaaaattagataagcatacttcgaatatccataaagataacattgacatgaaatgagggatttctatgagattaatatgacattaacaaaaaacatccaaacaaaagataaatcatcctaattgttaatgtcatgttgatcagaaatagaaactgccatttacatttagagatattagttattctaatgggtgtttatgacttagatacccattaaaaagttaataaaagtaattagtaataaaatatagcatgcgctggtttgttagttattacattccagtaactaatgataataaatgtagatctactaattggttttacgttaatttatatctgagtatcatcggattgatataacacataaaatatcgatatgaaattaacatctgtacatttttatttcctttcatatcaatgtcaattgatatgttaatttcattcgagggtattagtgttggttaattgtttatatgacattaacaaatttgggttgtgtacttcaaattgtgttaaaaattaaatggagatagactttctttgaaaccttcttgatcaaggaggtttataaaaagaacggtgtagcatattgggagttttggttgtaaatagcagttgtaatacttaggtatacgacttatttatttgggcatactataagtatgagttcttttctatgataaaaaaagtgcagctaatatctttacaatctataattatagattgtagtttttatagtatttgagtagaagaaatgattttgtgtatcattctaatataagtatatactaactaaaagtcattttaattgttacaagaaaaatatgttatggatgtatattcattattagcgtgctttttgtctaataactaaaataggaacttaaaagcaattttataatttttgtttgcgaaatatgtaattaataaattggcttaggtatgaactggatggttagtttaacttgtattcatctctcaatatgaaatttcatgtcaatgtcagttgatatgttaatatcaaccgaacgagtttgtgtcgctttattgtttacataacattaatatgctttagtcgtttgctgttagttatgctatgagtaatataaagattgttttatatttaaagttctctaaggtaaggaatatattaaatgaatgttttttacttttgaaatttagttgtaaataaaaaaatcgaaattttgttatgaaaatcctatacttagatatactaatagtattacctgaattaggttattaaatgacatatgcaaaaaagaaaaggttaatcaattagaagcattatttttgtgagtttatttaataattgcgaagtagtattgacatttagatattatatagataatcttatacataagttttattgtttaaaattaatatacaaatcgagagatatttaattcttgctaaacggacacaccgagggcatatacctgccattggtgtgtctttttttatttaataactagaaaatgataaggagagtattaaagaatgaatgaaattattagtgaaagtaaaagaagatttgataaatattgtaaagataatcaagtttttgaggagagaattaattctcttattaactactattttttactgcttgctgatcgtgtaaacattttacaagatagagaatttaataacgaggtcgaagagaagcaatttaaaagcaatctcaaaagatttgaaacattattcccagctgctgctaagaatgcatttctaaaaggatatcagcttggtttagagtttttcaaacatccagagacagtgattccggattctctatttataaatcctaattttgtacaagatattccttttgcaattgtaaatgcagcggaatttagcatttatgaattagttcgaacggatgaaacacaagaatttagtgtatttgctgttcgaacgtatgaaggcattaaacccataatggaacaagtattttgtgaaattgcattgtttggtgcggaaatttcgcttgagcatgaacgtgaggaaagaggactgaaagtagttgaaggaaaaacaactacttttacaaatgttccagtagatcgtttatttacaattactccatctgtagctgctaatgttgtgcatgcggacggccgctgtgaaatctggagtctaaactggaatacaaaattaactttagataatccttttattgaattagcacaagtaaccattgtttacaaagacaagacagaaatacaaaaaaatcttcgggatggatttatatatgaacaaagtttatttagtgcgataccgttagaagaaatagaggatcgtttagaggttagagtcaaatataaccttattgataatatgccatgtaatttggatggatttgaaatagaatcacttctcaccgaattattaacaaaaatacaaaacgcaacaaaagtgccttttgaaaacatgctattactttaaagtgattttctatcaaagaggagtttttcataatgaaaaagattgttttagctattagtgatactgtgtatacggcatatttacgtgaggattttgttggtgcaggatttgaagtagctgatagtgatgtcatgcacataaagtatttagatgaaattctagatacggagcaacctgatattctatgtattaatgacaaacgattaaatattgatgcgggacacgaagataagcgagaattaattattttacagaagttaagagacattcgctttcagcgggatattcgcattgtagtatttacagagcgtgaaaataatgatgaatttttagcgaaactgatttatctaggtatctatgacatttttaactctcgtaaaattgatattgataataaagtcatcccacagctgctacaggaatcggatattaaaaatgtggtggaaattgtaggagcaagtcaagcaccgcaacatacgaaattgcctgaagtgccttttgatgaggaagaagcgaaagtatcaagtgaattagaggaaggtaacaacagtgaatcacactctaatttaaaattatttaaaaacaaacaaaagcgtaagtctattcaggaagaaacgtcaaaagcgccaattataaaaaaacagtataaattggcttttgagccagtatatgagaaacaaattggtattgctattccaagacgaacaattgttgtggccagcatgaacaggagaagtggtgccacatttgtttcacatcttttagccgcttacttaaatgaactacagattgatgtgaattatatagagaatctatatgatgatggttatacgtatccgttattaaagggatatacagaagcgccagaaaactatcgtagtgaatttatgttgcagcgatataaagagatgctacagaaggaatctgatatattattaattccaaaatggaagcaaggaagaataaactatattgtaaagaatcctatagttgaccaagagctgaaaaacgaaacagagcaggacttcgaccattttattaaggttttattggccaaccaggaagcacctatatctattattgatgcaggaagcgattgggataaagatttataccatgagatatgtgaaatggcggattacatattctttgtagcggaaccagatctgcatcaattgctaaagatagcgcatcctcttacacaaaaagagagaaagctcgtttcttacttaggtttagagaaagtgaggatcattgggaataagttttctcctgtacttttaaagcatgaaatagtagaagaatgctttggagataaggtattaactgctttaccaccatatgaaatagaagatgtgtttgagtcacaattgaatagtagtacgttactatcaagtcgcaactattataaagagttagaaggaataatgaaggaaatagcagagttattgctaccaaatcaattgttgaattccaaaaaaagttccattttaagtggatttcgatttcgaaagtctgaaagttaaggaggctgaagaggaatgcaaaagtttattgttgcagcaagtatgttgctgttatttgtaggttgtctatcctttgtaactgatatggtgattggagatacaacacatactgataataaatcgtctttagaaaggggaggtgagatagctgtggctaagtctgtaaaagtaggtactctgcgtgcagaagaagaaatagctattgatccagaaaaagcgaaacaagagtttgaaaaggcgtataacggtaatgcggattttaaagatcccgcttcaaaacgtaacttcactgtacatgatgtacaggaaaaaccagcaatgattgctgtcgaaagtgatgcagaagctgctagttattttaagcaatttgatgaaaaaaaagaaacgataaagagtaaagcgagaagtattattatttatgatgcgaatggaaaagaaaaacaaataggtggaaacgtaaaataaagaaaaagagtaggtgcattaaaaatgcaaaatacagtaactacggctctattccttaccttttctttattattaattagccttttacccgaaggcgttttgtacggaatacagttagtgaaagcacataactttgctgctgatatggtagaaaacgcagaaaataagggtggatttcaatatgattacaatggaaaaagggtggatttagtccctgggatagagaaaagaatgaaagaagaaaagatggatggatggaagtatgagtatacaaagggacgcatcgatcataatcaatccctttcttttaaggtgaaagcagaacaccatttcttcatatttaagttgattggtgtagatggcataaaagctccgatatgggcgagtaaagagggattgggacaagtatattttaagtaatgaaaattctaagatttgtactataaaagactatgctgaaaagtatagtttttttgtcaggaaaatatacctatatagacagaagttataaaaaatgttaattaattaatttatatgttaaattatctggattttatgtttaaattaggtacaataaaagaatctatgaaaaactaatatatttggaggaacaaacaatggctaacaaatttttaaaaacagcaacagcactaacaattatgggtacatcattactaggagcaggagcatttactgctaaggctgataacacagactcattaaaattcaatgatgttccagcaaatcactggtctacaaaagcaatttatgatttaacaaatcgtaaagtagtgcaagggtacggaaataatatctttggctttggtgacaatgtaactcgtgggcaagttgctcgtatgatctatatgtacgttaaaccagcagatgcaaatgctagtttcaaaaatccgtttactgatattaaaggacatttgtttgaaaaagaaatcttagcacttgctaaagcaggacttgtcaatggatttggtgatgggaagtatggtccagatgatattttaactcgtgaacaaatggcacaagtgcttacaaatgcttttaaatttaaggcaacgaaaacaacaaaatttgcagatgttgataaaaactcatgggcattaaaagcaattagtgcattagaagaaaatggcgttactattggtacaggaggtaatatgtactcaccatatacacatgtaacccgtgaacaatatagccaattcttatacaactctattaatgcagttgaaaaagaaacaaaaccagaaagaaaaccagagacaaagccagaaacaaaaccagagacaaagccagaaacaaagccagaaacaaagccagaaactaagccagagacaaaaccagaaacaaagccagagacaaagccagagacaaaaccagagacaaaaccagagacaaagccagaaactaagccagagacaaagccagagacaaaaccagaaactaagccagagacaaaaccagagacaaaaccagaaacaaaaccagaggaaaaaccagaacagcctaaagtacctgagggattagacgttgagattgcacaacctgactttgattaccaccctgaagctttgaaaaatgaaagtgtgcaaaaacaattatcatcagaagcacaaaatatagtaaaagatattaataaaaagtacaatacgaatcttaaatataaagatttaagaggaggagtacgtattttggataaagatatgtatcttccagctggttcaataggtgcacaattcgcagttgaaggttctgtaaatagtaattataaaatctattttttagataataatccagcaactgtagaattagctaaacgatgggttaccttcttaagtggattgaatttagagcaagaaattgatgaaactattgcgcaagactctattaacaattatcaaaaaggtaattataaagtccgtattggtcaaactgcagcttttgatacaatgtatattcaaattgaaacaaaataatgatatactaagtattataaaatatgaatataatatttaattaagcatacgtaaaggacacaccttacgtaccatcccaatggtacaggtgtgtccttttttatgttttgggaggagaaagaaatgaaattaaaaagaggtttactatttatttgtacttcaactatgcttgctataccaagtatggcaagtgctaaaaacaacgatgtcccattctataacggtcaaaatgattcgtttttaacttcacttaacttacagttgccaggaaaatattatagacctggaagtggatatgcagctaaagaatctttatacagggccgatgtgcactttcctgcagtatataacggctcttttaattgggataacccaagggagaatttagtacaagctgaagatacttcagagccgtatattcgaattgcaaatgaaggttatttaaatagtaaagtaccagcgggtgaccgtatggtgactgaagtagaaagggttaataattctgttatttctagtaaatattggggaaacccagaattcgttttagaaaatatggataaacatatgatacaaacttatgaaagttttagagaacttggacagttttattggattcgtgacattgcatatctttctggtggatacgctggtgctagtggtgtaggtaatataaataaatatagcctgtggtatgtacgtacaagtaaacctcaagtaaaagactttcaagctatgagtggaaaaaaagatatacctgttaaatttacatttaaaggttttgagtatgtaagtaaaaataaaggatacaatgaccgagatcccaatggaacaacagtaaacccttatcaaaaagctgctggagaacggaaccgagttaaatggatgttagatattacaaaagatggtgaaaccgtgtatcaccaagaaaattatctgcgttcaactccacaaaaagataaccaaaaaccaaatgaaggagatgcagggcaatttaaaaaagaagatataacctggcagccgcaattgtgtgggcaatatactgcgaaaattaaagtcctagatgctgttcagagggaatcaaatgagaaagctgttgatttcaccattgatggcaactgcggtactgaagtaacacctaacccagatccaggtgatgaagatgactttaaatataaaattgatttctctgctgaccgaattgaaggagaaacagcaagagaaggaaagaatatcaaaacaagagtagatgtatcacgtgataattttaaactagagcgtgatcaatatagagcaaaagtaaacaacaatattaataagtcacagcaagaaataaacagcactgaatctgatagagatagtgcacaatccagcttaagttattgtcgtcgcaatccaattcatgaagtagatgccgagggaaaggatcactattatgatagagactgctcttgggaagaaaataaactagatagtgcggcaagtaagctagataatgcaagacagaagttagaaaaagagaagaataaaattaaaaagttagatgtattagaagaaaaatatacgaatcctgaaacagtagttgtgttaaaacataacggacaacaagtagctttacaaaaggtaagattaactgagggagaaaagaaaaccctgaatcttgactggcaacataaaggtaaaggaacaattcaagcggaaattaaccctgctggtaaccgtatagacatcgaggaaactacatacaaaaataatcctattaaaacagcaatctatgagccttcaaaagaaaaggcaatgtgtggtgtaacgagtgtaaaaggtgtagtagaaacagtaagtgaacgtgtatcaaaagaagatataactggggaaatgtattatgaaactttgacagggagtattgataatttagctccttctaagctacattctggttatggattttcgtatgaagtaaacggtaagtacaaaaatgattggaatgcgaattaccctggtgtatttactgctgctaaggcacaatacccatttgcagacgaaggattaaagtctactcaagatttagagaagaaagaacttaaagatactacagcgaaattcctacctaaaaatatgtatttatctgaagcaacaggacatgtttttgatagtaaaagaccaactaagtctttatattgggatggacaagagaaaattattgatggtggccaaaaatggtattcaccattgaagacaaaagatggtgtatacacttttaatgtagaaacagctccagcaggtatcaatgaaatgagtttatgtttaactgagcaagtagagattaagggtgttgcgtatgatgatttcataaaaagaagagtatttcctgacgatccattccctggaggaagtggagttggttggaattgggttggtaaggaagatgtactttataaattaacagattggtattacatgagaaataggaaatgagaataaaatatagtataattagatgaatcaacacaataagatatccttcttaaactagtagctgaatggataaaccaaaggcacatcccttaatgggatgtgtcttttttttgtagaaaggggaatattgaatggataaaaagaaaaaacaacgtatgaaacgtgtaattttcattggaattatcgtaatgattgcatcgttatatattggaagtgaatttcaggatcggaatgggaaaagttatgctcctgcaaagtattttgaaacaggaacaaaattgatttcgttttaataataattttgcctcttgcatcaactattgtgaacagtatttccaaatgatctcttcttttctccataaaatgaaagagaaaggatagcaaccgacaccttggaatattcagttgtgttagattaattacaacatatttttgggatgcttaataggttagaaatcttgttataacagggtttttggagcgaggttaattatcgattacgtggtttttaaatagaaaaaacagatattttttagaaatgattgacatgaaactatatatatcataatattgagattgtaatattagagaaaataaatccaacattttcatatagactttagattagctaaaaggacacacctaaggcgttttacgccataggtgtgtccttttttgcgtttaaaggctacataaggaggaatataaacattgaagccgtctaagtttcacaagaagcagattacagcggtaggtttagctgctataacagtagcgggtatctatggatacaatcattttgcagtagaaaatgcagtaaaaccaacaaaagttgttgtagctgcaaaggatatacctgcgcatacagagattaaagaagaaatgctagtggaacgaacattacctggtgatgggattcctccaaatgcattacgtgtaagtaaaaaagaggttataggtaagtggacaaatgatgggcagcccatcaccgaaaatagctatctttttaaaaataaagtagtaaagaaagaggagttacctgactctgctattttaaatttgaaagatggagaagttgcattcccgttacttgttgatttggaaacaagttcaggtaatagtatcattcctaacacttatgtggacttatattttaagcaggttgtgaaggacggggacaatgagaaggtagtattcggtggtcttttccaacgtgtacgtgttacggctgcaaaggatagcaatacagaagatgcatttgtactagaaaagaaagaatcaaaagaggaacaagaaggaaaacaaaagccaaaagtaacgcgattatatacattggctgtttcaccagaacaacttcaatatctaaatcgtgcgaaaacacttggagatgtaattcctgttgcagttggacaaaaggtagaacaaacagggaaagaattagaaccagcagaaggattctcgcaaatatctgaccagaaaaatattttagactatgtagagaagcattcaaccaatcccatatctaaaagtgtaaaagaatatgttgcacagtatctgaacgaatccaaataaggaaggggcttttaagatggaccggcaagtaagaatggttgccttttatgcgacaaacgaaaacgtaggaaaaagtacgttaagtattgcgatggcaaatgagttagctcatttagggaaaaaggtgctttatgtagaagcggaccaagtaagaccaaacttcgcggttggaacaggtcttagccatgagagtaaaaatatgctagggcttgtaagaaaagaaaatgaatacaatctcttgcagtatatttgtaccaagcaagatttactagaaaaaaaagtgaatccaaggttgacgcaaaaattacacgataagatggattttctggtgtttccatcaggttatagtttaactcaattcccagagattcaaaacaaagaattgtttgtaacgacatttatcgaatcacttgtagatacagaatatgactacatcatcctatcggtaccaactgaattatccgaggtgcttagttacccaatcctataccaatcagaccttgttgttcatgtgctaaatggcaaccctcgtggtgcgttagcaattaaaagagaattacaactaatagaagaagcaaagctaacattacctcgtatgattcatgttttgaatatgggagacgaggactatgtagaagatattgaaaagctttcttcccaaaacattgcggtgacaattccgtatgacagagatcgtacgagttatgaatggggaatgcaatttggttccccgcaaattaatgcaaaggtccatcatattatggaagtagctggtcttaatattccatcccagcactcctctatgaaaaagggtctctttggtttacgaaattaaaaaggtggcaagtagtatgtggggctatttacaggaaaaacaagtatccttaaagcgaaatcgagtggacttatatcactttggttataggattcgttctaaatcggttcgaaagttaggaacaactacagctcaacaaattaaagatattacagatgaaattcgtgcatttttagtaaaagaacatcgtgatatcttaagcgaatcctttatgaataaagagaagagaacagctgtggagcaaattattaaaggctttttactaagcaatcaagtcgtcgtttcagatgtaccttcggaacagttactaaatatggtgtgtgatgaaattgttggatttgggattatagaacctttaaaagaagataaggatgtaacggatatttatatcaatggcacaaaagaaatcatttacgaaaaaatcggagagggagaatgtacatttccttaccgatttgagacagaagaagaagtgaaagccctagcttataagatggtaaacagtacatcagagtcattaaatacagcaaagccgtatgtggactgcgtatttccgtatataagaatcaatatagccctagatgagctaggggggctaggaacaacaataacgattcgtaagaatgcagatcacctccgtgcctctaaagaacgtatgttatctaccaatcaagcatcgaaagaaatgttacactttttggctgcagctgtgaaagccaaaatgaatattttagtcgctggagcaacaggtacaggaaagtcagagtttatgaagtatcttgcttctcatattccaaatgggaagaagaaagaacgtactctcgtagtagaagataaccccgaactctatttacatcgcatatttccagaacatcacttcgttccgatgcaatgtagggcatcggaagtagaagaaaatgcaatcgattttgacagattgttaacaaatgctttacgtcaaggaccaaagcgattaattgtaggagaatcgagggggaaagaagcgttaaaaatgattaacttctttcaaacaggacatcctggtttcacctctgtccatgcaagaagtgcaaaagaagcggttagacgtttaatgcttatgtgtctgcaaagtggtgcgaatattgatgctcagtatttatatgaattaatttcacagacatttgatgtgattgtctttttagagaagaaagatgatgggaatcgctatattacagagatgattgaattgttagattatcgagatgatatacagttcaatcagctttctcaatttattctgtcgggtgaggaatacgatgaaatgaatgagagagtaggaaagattcatggagatcatatcattacagcaaaaatgtcagctgaaatggagaagaaattccgttcttctactgtaaatccagctctttatgcgccattcctttcacaaaaggaggtgcagtatgcatagtttgttagcctatggatgtatatttttaatctttattagtgtaggattgctcgttttactttttgcaaaatctaaaggttctgctctttctcaatttgttcaagaaaatgagaaagaagaaaggcgcttggaattaagaaatatcaaagggatacgaatgtatttgccacaatccgttatccaagaagcccaaaagtacgagtggaaattgacaaaaagtatgtactgggtatatacgattctttccggaatgagtattgcagcagtattctatttttcctttggtagagatctttttacactgattactgttttatctggatttttagttccaaggtttcttctttatcgaagaaaaaaatgttactacttgattgtcattgaccgtctttctatctatatgaaggcagtagcaaatgcacttcaaattagcaacaatgcaaaacgtgtgttagttcaggtgaaaccaatgatgcatgaaagcattcaagaagaaatagaaaaagtttctcttttattagaaggtggaaccacaatgcatcgtgcatttagagaattcaatgaaacgtttaactttagagaattggtattcttccatgaaatgttggaagtgtgtagccgagaaggtggaacaaattcagtgcaagtcttactagatattgcagaagattgaataacgttttttgacacttgggggtagtgcaaattcttaagttgatgggcatgtgttgttacccctaaaatagcaatttttatattggattcaatctgtttgattatataaggttttccgaaataaggtttctttatgtttttatctaaaatgtttgctgataggtacgggaagttcgcagtagtcacagcattatttaatatatccatcccgtaattaaattcatgattgccgataattgcagcgtcatactgtaagtaattcgctaataaggacattgggttttttttgtttttttcgtatgtaacataatgataagtaaatggtgttccttgaataaagtcgccattatcaattaaaagaacgtttgtattttgggaacgttctttttttataagagtagaaattttagctaaaccaagttctgctggggagttatcttggtagtgaataggataaacagtgccatgtatatcgcttgttaataagatgtttaaagttacagtttgattttgttccaatatgactcaccttttctattgttatcttccaattcatcatatcaaatatgtgaagagaattttaatgtgagtgtatagaatgtgtaaagattctgtaaataatcaattatttgtaaaaatatgtgatatatttcttcatgtttatgaaaggttattttataacaatgaaaaatggaggcattaatatgttgaaaaaagtttttgcaatgagcacaacagttgtactagcagcgggattattaagtggctgtggaacgaaggaatcaagcgcaagtaaaaatgaagatacgaaaaaagggtatgtaccgaagactttaaatgttcaatttgttccttctcaaaatgcagatacgttagaggcgaaggcaaaaccgcttgagaagctattaagtgataagttaaatattccagtaaaagttagtatttcaacgaactacaatacaattgtagaagcgatggcatctaaacaagtagatgtaggatttttaccgccgacagcgtacgtattagcacatgaaaagaaggctgcaaatgtaattttacaagcacaacgttttggagtagagaatgaaacaggagcccctacaaaagatttagtagattattataaatctgagtttgttgttaagaaagattcaaatattaatagtgtaaaagatttaaaaggtaaaaaaattggctatcaagatgtaacgtcatcagcgggatatgtgtggcctgcagctgttctattaaaagagggaattgatccgttaaaagatgtgaaacctgttacattaaaaggtcacgatcagtcgcttattgctcttttaaatggtgacgtagatgcggctgttgtattccaagatgctcgtaatattgtaaaaaaagattatccgaatatatttgatcaaacgaaaatagtgaaatttactgagaaaattccgaacgatacaatttctgtacgatctgatttagatgcagaatggagcaagaaattacaagatgctttcattgaaattggaaagaatgaggaaggccgtaaaatcattaaagaagtatattcacatgaaggatatgttaaatctgatgatagtaaatttgatatcgttcgtgaatatgggaagaaagtaaaaacgcaataatacatatggaaatggcagctagctgaaaggggatgttttcagttagtttgccgttttgaatacatagaaggtaggtaagatgtgtgatagagtttcgaaatgtctccaaagtgtatccaaacggtacaaaaggattgaataatataaacttgaaaattcaaaaaggtgagtttgttgtaatggtagggctgtctggagctggaaaatctacacttctcagatccgtaaatcgtcttcatgagattaccgaaggagaaatcattattgaaggtgagtctattactgctgcgaaaggaaaaggattaaggcgtatgcgccgggatatcggtatgatcttccaaagttttaaccttgtaaagcgatcaacagtattaaaaaatgtattagctggtcgtgttggatatcattccacattacgtacaacgttaggtttgtttccgaaagaagatgtggagctcgcatttcaagcgttaaaaagagtgaatattttagaaaaagcatatgcacgtgctgatgaattatcaggaggacaacagcaacgtgtatcaatagctagagcattggcacaagaagcaaaaatcatattggcagatgagcctgttgcatcgttagatccacttacgacaaagcaagtattaaatgatttgaaaaaaatcaatgaagattttggaattacaacaattgtgaatttgcattctattgatttagctaggcaatatgcgacacgtattattggattacatgcaggagaaattgtttttgatggttcagtagaagaggcgacagatgaaaaatttgctgaaatttatggagatgtagcacagaaaaatgaattgttagaggtggcagttaaatgagtgacgtaacgatatattcgaaatcgataccgaagccgccgagtaagttgaaacatatgttaacgtttattttagttattttaatgctgtggagtagtagtgtacaagtagatgcatcattttcaaaactggtagacggttttcccaatatggtagatctattgaaagagatggtgccacctgattggagttattttcaagttattacaacagcgatgttagatacaatacgtatggccattattgggacgaccttaggagcgattttagctattccacttgcactgtttgcagcaagtaatgtgtttactaacacatttttatacagtctagctcgaatgattttaaatttgatacgaacgataccagatttattattagcggcaattttcgtagcgatttttggaattgggccacttccaggtattttggctcttacttttttttcaattggacttgtagcgaaattgttgtatgagtcaattgaatcaattgatccaggtccgttagaggcgatgacagcggtaggagctaataaggtgcaatggattgtttatggggtaattccgcaagtgaaagcacattttgtctcctatgttctttatacatttgaggtgaacgtacgtgcagcagctgttttaggtttagtaggagcaggtggtattggactatattatgatcgtacacttggatttttacaatataaacaaactgcttctataattatttatacccttattgttgttttgttaattgactacattagtacattgttacgggagaaactataatgaatagaacgacgatgattgtgccaaaaccgaagaaaccgagtatatatcgctggattattttaatagcacttacagttgtatatgtatgggccttttcaggagtaccattagaagggataaaggacacagcaggtgaaatcacgaaagcaattatgacagggatattaaatccagactggtcgtatgtatctttgccagatggtgaagatttattacatggattaattgatacgttggcaattgcgatattaggtacatttatttctgcatttttatctgttccgtttgccttttgggcggcaacgaatatgagtattggaaaattaacttcaggatctgggaaatttgtgcttagttttgttcgtacgtttcctgaattagttatggctcttttatttataaaagctgttggtccaggctcttttgcaggagtattagccttaggattacattctattggaatgttaggaaaactatattcagaaggaattgaaaacatagataaaggaccgacggaagcgttactagcaacaggagcaaaccgttttcaaatactttggtatgcggtgttaccacaagtgttaccagattttctatcgtatacgttatacagatttgaaattaatgtacgatccgctgcgattttaggggttatcggagcaggagggattggtacacctttaatttttgcgctgagttcacggaattggtctcgtgttgggattattttattaggtattattttaatggtaattataattgatttgatttcaagctcgattcggaaacggattgtttaacttatttgaaaagcatcgaagttagatgctttttgtgtttttaaaaacgtattaaaaaaagtaagtatagaagaaatttgtataaatatacagataattccctttctttttaaaataaaaataatgaaaaagtatgtcatattgaatgcccatacattcccgggaacattgatttttttataaaaaaccaaaaaaatatcaacatatttgtcgatacatgttgtataatcttgcgtgggaagctatcatataaatgtataaaacgtttactaatataagcgaagggaagaatagcatgtcacattcaatcgaacaactttctatcaacacgattcgcacattatccatcgatgcgattgaaaaagcaaactctggtcacccaggaatgccaatgggtgcagcaccaatggcttatacattatggactcaatttatgaaacacaatccaaataacccaacgtggtttaaccgtgatcgtttcgtattatctgcaggtcatggttcaatgttattatacagcctacttcacctatctggttatgatgtaacaatggatgacttaaagaacttccgtcaatggggaagcaaaactccaggacatcctgagtacggtcatacagctggtgtagatgcaacgactggtccacttggacaaggtattgcaactgctgtaggtatggcaatggctgaaagacatttagctgctaaatataaccgtgatgcgtatagtgtagtagatcattatacatacgctatttgtggtgatggagatttaatggagggcgtttctgctgaagcatcttcattagctgctcatttacaattaggtcgtcttgttgtgctttatgattcaaacgatatttcattagatggcgatttaaatcgttcattctctgaaagtgtagaagatcgttacaaagcatacggatggcaagtaatccgtgttgaggatggaaacgatattgaagcaatcgcgaaagcaattgaagaagcgaaagctgacgaaaaacgcccaacgctaattgaagtaagaacgacaattggtttcggttctccaaacaaatcaggaaaatcagcttcacatggttctccacttggtgtagaagaaacgaaattaacgaaagaagcatatgcttggactgctgagcaagacttccacgtagcagaagaagtatatgacaacttccgtaaaacagtacaagatgttggtgaaactgcgcaagctgagtggaacacgatgctaggtgaatatgcacaagcatacccagaattagcaaacgaattccaagcagcaatgaacggtcaacttccagaaggttgggagcaaaacctaccaacttatgaattaggatcaaaagcagcaactcgtaattcttctggtgctgtaattaatgcaattgcagagtctgtaccatcattcttcggtggatctgctgaccttgctggttctaacaaaacatacatgaataacgaaaaagactttacaagagatgattacagcggtaaaaacatttggtacggtgtacgtgagttcgcaatgggtgcagcaatgaacggtattgcactacatggtggtttaaaaacttacggtggtacgttcttcgtattctctgattacttacgtccagcaattcgccttgcagcattaatgcaattgccagtaacgtatgtattcacacatgacagtatcgctgttggtgaagatggtccaacacatgaaccaatcgagcaattagcagcgcttcgtgcaatgccaaacgtttctgttatccgtcctgctgatggtaacgaatctgttgcagcttggagacttgctttagaatctacaaacaaaccaactgctttagtattaactcgtcaagaccttccaacattagaaggtgcaaaagatgatacgtatgaaaaagtagcaaaaggtgcatatgtagtttctgcaagcaagaaagaaacggctgatgtaatcttacttgcaactggatctgaagtaagcctagctgttgaagctcaaaaagcattagcagtagacggcgttgacgcagcggttgtcagcatgccatctatggatcgcttcgaagctcaaactgcagagtacaaagaatctgtattaccaaaagcagtaacaaaacgtttcgcaatcgaaatgggtgctacattcggatggcaccgttacgtaggtcttgaaggagatgtgttaggtatcgatacattcggtgcttctgctcctggtgagaagattatggaagagtatggatttactgtagagaacgttgttcgtaaagtaaaagaaatgctttaatgatttcagaaaaatctctccggcatggagaggtttttctatgtaaatgagttttttcgacagaaaaagttttttatctctccgcagtcagacaatcattgcaaattttcttatatataatgaagagaaaaggttgtccagattgggagtggaaaaatgaaaacgtatgaattgtatttaattcaagaggatattgcgaaagcttattttggtcgtgaatatttgttttttgatttatttgctcgattttcagaatctgggtccctttcggagaaaaaagtgttatataagcaaatgatgtatataacgatgccattgcaagtaatgaaaattcatcataaattagaacaagctttgcgcgttcttggtaaatatgatagaacacatcatacacatacactttatacgggagcggagtacggcgaaataatggtgaaaccgcactatattcgtatgaatacctctggaaatgtctctatggaaacaacattctttgaggtgttaagaaagtgtgaattaacatttttagctatggattatgaaaatacaaagtacggatggctgaatcctctaaaacaagtacgaacatatgtgtaaaaaatgtcgaattgtatcttgtcttattgaaaaggttttagtacactgtaaggtagacaacatgaaggaggaaaatatatgccaatttggttaggtattctagtgggcgtagtagcactagtagcaggcgtggcgttaggatttttcattgcccgcaaatatatgatgaattacttacaaaaaaatccaccaattaacgaacaaatgttaaaaatgatgatgatgcaaatgggacaaaaaccttcccaaaagaaaatcaatcaaatgatgagcgcaatgaacaagcaacaaatgaaataagcgctaaaagacactcgctaaaagacactcgctaagagtgtctttctttttgttagttatagtttttaaaacttttaaaaattctgtatttttggtaaactgaaaacatcgctcattttaagggaggaggaaaaaaatgaaagtgtttatgaatttagcgtggttttttaaacaagaaaaacgagcgtacataactggaattattttattgtttggcgttgcacttttagaacttgtagcaccaaaagtaattggaatcgttgtagatgaaattaatgatggaacattgacgaccgataagttactaaaatgggttgtactattagtaattgtaggcattacgatgtacatattacgttacatatggcgtattatgattttcgggtcttcattaaaattagctcgccaattacgaaaaaatttatatgaacattttacaaagatgagtccatctttctatcagtcaaatcgaacaggtgatttaatggcacatgcgaccaatgatattcaagcgatccagcaaactgctggagcaggtgttttgacgcttgttgactcattagctgtcggaggatgtgtactcgtagcgatgggttttacaattagctggaagttaacattattaagtttaattccaatgccgattgtagctatttcgacaaattattatggaactttattacataaaaggtttcataaagcacagcaatcgttttcggaaatcaatgataaagtgcaagagagtatgagtggaatgaaagtgattcgctcgcttggacaagagaaagaagatttgcaggcgtttcgaagaaaatcagaagatgttgtaaataaaaatgtgttagttgcacgtattgattcgttatttgatccgacaatctctcttatcgttggattttcttttttaatcgcagtatgttatggatcggtattagttgtaagaggtgaattaacagtaggtgatctcgttacatttacgacatatttaggtaccctcgtttggccaatgttagcgtttggatggttattcaatattatggagcgtgggcgtgcttcatatgaccgtgtagaaaaaattctttcacaaaaatcagatgtagtaaatagcgaaaaagctgtacagacaatagcgagcggtaatgtttcgtttgccgttgattcattttcgtataagaaaaatgaattgttacatttaaacgatattcactttgatttgaagaagggcgaaacgctaggagttgtaggacgtacaggcgcagggaaaacaactttattaaaatgtttaatccgtgagtatgatcattttaatggtgaattaaaaattggggagcgagatattcgagatataacacttcatggtgtccgttctgccatttcatacgtgccgcaagatcattttttattctcagcaagtattggtgagaatattgcctttggaaaggcggatgctacatataatgaaattacccaagctgcagagattgcttgtattcataatgacatcctccaattttcagaaggatatgaaacagtagtaggggaaagaggtgtttcgttatctggtggccaaaaacagcgaatctctattgctcgtgctttattaacaaatgctgaaattttaattttggatgattgtttatcagcagtagatgcaaaaacagaagagacgattttaagtgccttaaagagggaaagagcagggaaaacgacgattattactgcacaccgattaagtgcaattcagcatgccaatcttattcttgttgttgatgaaggtagaattgtacaaagaggtacacatgaggaattaatgaaggaaaacggctggtataaggaaatgtatgaaagccagcaattagaagctttagtcgagaaaggaggcgtatgatggtagagaagaagcgaagtgatttaagtagattgctttcctatatgaagccatataaagggttgctatctttagcatttatctttttagttggtgcgacagtaacggaaatgatgggtccttttttaattaaacaattcctcgatgaacacctagtaccgcgggattttgaacgatcagcgctcgttactttatttgtaatttacatagttgctcatttattaaaagtattatttacgtatttaaatctattgtactttcagaacattgcttttaagattgttcaagatatgcgagttgaagtatatgaacatgttcaaaagctgtcattaagtttctttgatcgtacgccgattggtacacttgtatcgcgtataacaaatgatacggaagcgattaaagatttttatgttagtgtattatcaacatttgtgaaaaatgtagtctttttagtaggtattttagtagcgatgtttttattagatgtaaaattagcgctattttctctcgtattaattccgataatgtttgcgattatggtattatatcgccggaaaagtgcagctttttatttagaagtacgtaatcaactaagcgtgttaaatgcaaagttgaacgagtccatacaaggaatgaatattgttcaagtgttcagacaagaaaaacgtatgagaaaagagtttgaagaagtgaataataaacattatagtgcagggcgacgtactttgaagttagacgcattacttttacgaccagctacggatttagtgcatattgtagctattgcgttagtactaggtttatttgggattgatgctttaaagagccctgttgaagtaggagttttatatgcttttgttaactatatacatcgtttcttccaacctgtaaatgagatgatgatgaaattgtcctttttccaacaggcacttgtttcgtcatcacgtgtatttcatttaatggacgagaaagatttagcaccggttcaaaaaggcaatgagaatcctcaagttgtggatggggatattgaatttaaaaatgttactttttcatatgatggaaagcgtgacgttttaaaaaatgtatcatttcacgtgaaacaagggcaaacggttgcttttgttgggcatactggtagcggaaaaagtacgattatgaatttgttaatgcgattttataatattaagtcaggaaatattgtaatagacggtgtagatttagaaaaatttgaagaacgagaaattagaaagaaaataggactcgtattgcaagatgcatttttatttgctggaaatgtaaagcaaaatattcgtatgtataatgaagaaattacggatgaagaagtaaaagaagctgctcgatttgtgcaagcaaatacgtttattgaaaagttaccaaaacagtatgaaacagaagtagtagaaagaggtgcagcattttcaagcggtcaacgacaattaattgcttttgctagaacgatagcaacgaatccgaaagtattagtattagatgaagcaacagctaatatcgatacagaaacagaagaggctattcaaacagcgttgcaacaaatgcgaaaaggtagaacgacgatagccattgcgcataggttatctacaattcaagattcagatcaaatttttgtgatgcatgatggagagatagtagaaagaggaacacatcaagaattactaagtgagcaaggtttgtattataatatgtacttgctacaaaataaagtgagtttgcaaaaggccttgtaatacaaggtcttttttattttgtatacaacatatgtttactctttgtttctatagcataaatgttgtgtcctcttatgaaacttgtacatattgtatgtatacgaagtaaaaaaattgataggagattttatatgcaaaacagatcaagttcaaatgttacgtttattgatgtgtctcattgggaagggaatattgattggaatgcagtgaaggcatctggaattccagcagcgtatgcaaaagcgacagaaggtgtaaactacattgatcctacttttactaagaatgtacaagcagcacgaaatgcgaatgtattaattggtgcataccattttgcacgcccagaacaaaatgatgcaatttcagaggcaaaatattttgtgggtatattacaaaataaccagacagacttaatgccagttctggatttagaatcaccaacagatccgagcaacagtaatttaactggtaacgctatatcgaattgggcaagaagcttcataaattatgtgaaacaggctactggaaaagatgtaatgttatatacaggagtttggtatattaatgagttcggaattagcggattaagtgatataccgctttggattgctaaatactcgagtacaccgcctgctgatgctggtggatggacagcgtggacagcgtggcagtacacagattctggacaaatttcaggcgtaggaaattgtgatgtatcagctgcagtttcattagaagctttaaaagggaatggagcaagtggtggaggtaatgtttccccgcctaataatgcaactccagtgtacggggttgctataattaatggagataatgtgaatttgagaagtggaccatctttacagtctagtgtaattcgccaattgaatcgtggcgaaacatatgaagtttggggagaacaagatggatggctttgtttagggacaaatcagtgggtatataatgatccgagttatattcagtataaacattatgtagcgactattactggtgataatgtaaatttgcgtgatgctccatcattaaatggaaatgttataagacagttacatcagggtgaatcgtatcgagtgtggagtaagcaagatggatggctttgcttagggacaaatcaatggatatactacgatccgagttatattcagtatggtgtacaatagagtgaaaataaaaggtgccccgtcagaggtgccttttattaaaaatatacaacttttacaaagtctatatcgaaaccatagtatactatagtagatatatttataaaaaataatcgaaaatgaaataaaggagtaaaaatatgaattatgtgctaataggtgcgattttaatattattagctgtagcatttgtgctgttttataaaaataaacagttagaatcagagagtcagcaagtagaatttgaaaagaaacaagcgattgaaacgtataaaaatgaaattgcagctacagtgatagagcataaagaacaacaaaataatttaaaaaatatggaacagaaaaaatacaatgatttacaagtaagtgcaaatagagaaattgaaaatatgcgtatgatgaaaaatcaattagctatgcagcatagtaaagaacgtagtgaaatacaaaataaacataataacgaaatacatatgtttcaaaaattaattgcaaatttacgagaatatactaaaaacggtgctgaaatgaatacgtacgaaacattacattatatgaagcgaggattcatagagcaaggcatcatattagatgctgaaattcaaatcatgccgaatgtttttattaaaaataatagtgaaataaacgataatcgaatccatcatctcatcttgtgcaaaactggtatttatctacttgagacgaaagaatgggaagagaaattaattcatggtttaacgaaagaaaatgctggtatatattcatttatgattgatgaaatgggtaagtatcaacaagaagttgaaaaagaagagacatttgaatatatagtaggtaaagattcgtcaactatacaagtgaaaaatgaagggaatccagtatataaggtgaagaaactatctcaaattttatacaattgtttgaaagaaatgcaggctaatagtataaaagaaaaggtaaaaccagttgtatatttttataatgaaaatggaaaagaaataatagatctttctagtgaggaaacacctagattaaaaaatcgggagcaaattgtaacgttcttcagaaatgaaatcttagcagggaaagtagtatatacagtgcaagaattagaacagattcgagaaatgattagccggatgaattatatagtgagttaaaaggggagatctttctgaacgctatgctacgtggcattttgtatgtctatttttgtttgtatatagtaatgtacattctatttatattcgtcattgatatggtccatatacccttaagtgtaaggagcatttttgtagtattcataccatttgttttattagtcatgatttaaagggctattttatatgtttctaaaaatcgtaatgaagaaaagaagcaaatgttgggggttttaatagtagcactcataccattaatagtgtgcactgtacaactaagtgtaaatgaatatacatcaaagtttaatcaaaatagatggttaaatcatgcagataagcgggtatatatggtagatgatctattacaaaaatataaattaatagggaaatcaaatgaagaaattatacaattgttaggagctccaacggaaacgagaagtggggaagaaggagttaccactttgtattatcttgggactgaacgtggctttattccaatagatagcgaacagcttgttttccaatttgatagagatggaaaagtcatggaatatacggtgcataaagattaaagaaacgtagagggaagctatatgttatagcttcttttttatttttcaatatgtcacggaagggggagaaggtttttgagtggaataaggaatgaaagcggaggtgatgcatatatatagatgcattgggtgattattagtccgattggtgaggggtaataattaataagtacggacaaaaaccccactcattaaagttttactttatcatattgtataaatgaaaaggaggtaagacggtgaaagcaatcccgactgatgtcctgagtaaagaattgatggaaagagaaggagttatatctattacagtaaaggaatttgaaaaaatagaagtagctggagtagtggtcgctggtccagcggttattttgattaatcaagattaagtacatatttttgaaataaaaagcatccgtctaggatgctttttatttgtatgtaaggataaatatgatggataattgtgttactggagggaaagtctgtggcaattattataacaatgttagtaatgggtattttattaggatttgttggagctggaggagctgggtttattatcgcgatactcactttagtatttcatattcctattcatgttgctcttgcaacatctttaactgcaatggcatttacgacattatcaggtgttgtcagtcattaccgtgaaggcaatgttgcatttattataggcgggattgttggaggatttggcgcaattggctcttatattggttctaaatttggttcacttataccagcacatcttcttcattggtttacagctgggatgttatttttatcggcaatttttatgtttattaaattaattatgttccaaaacaaagaacagtcatctttatataagcataaagagttttccatgaactacttgttgaaatgtatatgccttggattagttactggaatgatggctggttcatttgggattggttctgcaccgtttattcagcttggattaatggttctattgagactaacgattcagcaatctgtagggacaacgatgcttgttatattaccgattgcaattgggggtgggctaggatatagttcggaaggatatttagattatatattgttattgcaagtattaatcgggaccatgttaggggcatatattggcgcgaagtttacaaattatgcaccgcgaatgcttttgaggttttcgatgattatgacaccggttttagctggatgtatgctattgatggaataaggtgaaattataataagtagggggttactgcttacaaatagcgggataaaattaatatagcaaactattaatatattttacgaatgaattatgtaggtaattcatatttcccatataaaaggatttgttttaatattatgagtgtaaagttcgagtattcgaagtactacttgaattatatccctatcccttttctaaaaatgcgaacaagttttgccctattctattcaatagttaattgtatagaaatatattgttcgatgaccattatggaacgtacataatgggaaaatcccgatccttaaagaggatgcccctaatcttcatgtgaaaatatgatcggataagaaagctgaccaattgatggtcagctttctttttgttcaaaaacaattttttctttaatttctgtttgtaataatacagtttttccgaagcgacgtttgcattccgcacgcactttttcaatggctagtagctgagtagtggcgggaactgtgacaatagcttggcgaggctttcgattttcttcacaaaagacacattccacaacataattagaaatcatattttcatccttccagttttaatttctaagaagggattgcctatgaagttgatgtaatctttcgtcattgttttatttttttcctctttttttcaaggggaaaataaaaaagagggcgaattttagtaggggagggatgtttatggagagatggataggtagtgcagcggtatgtgtaaatgaaagaaaggaagttttaatggtactgcagggcaaagagggagaagaaaaaaggtggtctgtcccaagtggaggacttgaaaagggagagacactagaagaatgttgtattagggaagtttgggaagaaacaggttacaatgtggaagttgtaaataaaatatatgaaaaagagggtattacatacggtgttccagtgtatgtccattattattttgttaaacaaataggcggtaatatgaaaatccaagatcctgatgagttaatacatgaaattgcttggaaagggatacatgaagttgaacaattgtgtttagcttttccagaggattatgaattgctgtgccaatatatagataaagaagcaagtatgtaaatacttgcttctttaatgtatccaagacaagaaaagcggaacgataactaaactagcgcctgctgttaaaagcatagataaacttgcaattgttccttccacaggaccgatttcgaatgcttttgatgtaccggttccatttgcgcttgttcctaacataataccttttgcgattgctgttttaatacggcaaatacgtatgagagaaggaccgagcaatgctcctgttaaggcagttaaaacgacaaatacagcagttaattgtgacatgccaccaatcatttctgaaatagccattgcgattggtgttgttacgatatgtggcgctaaactatgttctagtgatgaatcaatttgaaaataatttgctagtagtgctgaagtaatgactgataaaaacgaaccgacaatgacattaagtaagatagccattccatgtttctttaataaatcaaagtatttatagattggccatgcaaaagcaactgttgcgggttttaataattcagttaaccaatgaccaccagattcatatgtttcataaggtgtatctaatccgagcaataaagcaattaaaataatgggacagacgagaagaggagaaagtagactccaattccagcgttgatacattttttttgatagccaatatgtgaatagtgttaatagtaaacaaagaaatccgatcattgcgttgatcctttccgctttagtagcaattctgttaaaagtcctgtaactaaggtaacgcaaagagtgctaatcataataattaaaatgagatcgattccatattgtgttagtgtatctctgtaacgtatgacagcgactgcagaagggatgaaaaataaaataagttcttttaataaaaaatctgctccgtcctgtatccattcttttttaactaggttaaattttaatgaaattaataataagaaaataccgattatacttcctggaactgggaggtgtgcctgttttgcgatccattcacctgtccaagcgaaacaaaatagtaataaaatttgtccgcttaacttccaccatttcatacagtaaccacctctttcttttgttacataaaaattgtaaaaaagaattaacaatttctactatacgttcattcaaaatatttgtctaatatataaattatatgttattaatatataagacatattaatcgaaagtgaaaagggtgtccaaaaatggaattacggcatttgcaatattttgttgttgtggcagaagagttacactttggacgggcggctgctcgtttacaaatgacacaaccaccacttagtcaacaaatacagcaattagaaaaagaaatgggagttacattattttcaagaacgaaaagaaaggttgaactaacagaagcaggagaaatgtttttaaaagaagtaaaaaaagcgtttgaacaaattgaaaaagcagtagaagttgcacaaagtgcgcaaaggggagaagtaggatcactttcaattggttttgtaggtgcggcgatatatgatattttaccatcaattgttagggaatatagaaagaaatttccgagagtgtctgttgcattacatgaattgtcaacaccagatcaagttcatgcacttcatgataaccgtatcgatattggctttttacgtccaccaattccaacgcaattattagaattagagccaattcaaaggttatcttgcactttgtgtttaccaaaggcacatccacttgcagagaaagatgaaatacatatagaagatttacgagatgagccgtttgtatttattacgagaccagtatggccagctttgtatgatacaattttatctctttgtagagaagttggatttagtccacgtattgtacaagaagcaacagagtatcaaacagttatggggcttgtagcagcagggattggaattacagtaatacccgtgtcggcaaataagttatataaaacagaagttgtatataaagagttatatgattctaatttcgttgcagaaatgtcagtggcttacaaaaaaatgaatagtaatccagagctgctagagtttttaaaaattgcaagagagaagaaaagaatagaagtagaagatgagtaatagtagtaacagaaaatggatttgattcaaatccataaaagtacaccttattaaacaataaagcggaaatgcaacttaagttgcatttccgctttattgttctttttttagctcgatactaaatagataaacgtgttcattttcttttaagagtaaatcaatacccttttcttcgtcaattgtagggacgcttacagtttctttactggtttggattacagcagctaaagttgttttttgattgtattttaaattttttatagattggattgtagtagttgcagagctatttacgcttggtggcgcttcttcaggaacaagtgttgaaccaccttcaatattcagataccactgccttttttcttgtatatctttatcaaattggaaatgtggtggtaaaaaagaaagctttactttcttttttgaaaaatgtgaggtagctatattagcaatttcttttgttttcttaccattgttataataatcaattgtagcatttatttcatctttatcatttttaagcgtaacgttataaaatatgctatttccttcttgaaaaggagtcatttgtaaaatagaagcttgctcttttgttaatttgtatggctcaacaatggcaacttcattgttttttatttggctacaacttgtgagtaataataaacacaagattgatagtaattttatacgcatgcaacctcctcctttttacaattatattctaaatgtgattttttatcattgcgttttctaggactaaagacttagaagaaattccgattgtagtgcgatgtttaaaatgtcatatttttatacactagtagtatagaatgcgtatgtaataaggtaggggaagaattttatgtctttatgtcggttagcgagaaaaaatattataacatttgctaccaaaaggatgaagcaatttatgtggattgctatgagtactatgattttgttttttatgatatcgttacaatttaatgaaggagctattttgaaagtagggaatgcatttgtatttcaaatgtacttttacacactttttattgtactaattttcatatgtatttttactacatataaaatgatgtactcccttttgcatgtgaggagggaggagtttatatcttatgtagaagaaaatatgaaaagaaaagaggtactatgtgtattatgtcaggagcaattattcatttatggagcagcatttgtttttggattaattaatgggatgctatttttgaaattattcacggttatctttatgaaaatcgcagggatacaaggaataaatagtgcgccaattacaatatatgcagttgtaattattagtgtaattatgatgactgtcgttttaatatcgatgatgcaatgttatcgatttgttcgaaatttaaaaggtgaaaattcgttgcggtttaaagaaagggcatgagaaatcatgcttttttctattttacacataaaaataatcatgttacagtgaaaagacctgacaaagaatgggaaggaaaggttgtatagaatgacaaatgaacaatcaattgtaaaagtcgatcggttaacgaagcgaatcggatcaaagacacttgtacaaaatattagttttgaagtgaaaaaaggcgaggttgtcggtttactcggaccaaacggtgctggaaaaacgactttaatgagaatgatggttggtatgatccgtatgacagaaggtgaagtatggattgatggtcaatctgtgaaacagcaattcgaaaaaacagctgcgaaaattggagcggtaattgagacacctgaattttatccttttttgagcggctatgaaaatttaacatatttcggacgaatgaatggtaatgtgaccgaagaacgtatcgatgaagtagtgaaattgttagggatgggacaagtaattgatcgcaaagtaaaagcgtattcactcggcatgagacaacgtttaggaatcgctcaggcacttattcacgatccagacgtgttgatactagatgaaccgacaaatggattagaccctagtggaatacatgaaatgagaatgtacataaaaaaattgcacatgaacaaggaaaagctgtacttgtatcaagtcacttactttcagaagttgaattaatgtgtgacagagttatcattattcagcacggggaatatgtggctacgcaaaatattcagcatagccaaagcgaagagatggagacgatccgtatacgtgtagatgatgcgaataaagcagcagaaatattagggcatgatgttttagtaaaagataatgaattacttattaatgtaaaagatgaagaaatcccaaatgttattcgtacattgcttgagaaaaatattcaagtgtatcgtgtatatgaagaaagaaaaacgttagaagagcaatttttagaattaacagggggaaaagatattgtttaatttagtatataacgaactgtataaaatatttaagcggaagcgatcgattattccatttgcagttattgcagtattaataatcggattaggatgggttacggtaaagtattttgaaccggaaacaaaaggatggaaagtagattatacagaacgaactgtagaaattgagaaaaagcttggcatgaaaaaagaagctattttagcagaaaaatcaggggatgagcttgtaaaagaataccagcttaagatgaagcatttagatacggatacagcaccggcaagcagttctccactttctttcatgagagatacaggttttatcgtatttccaattttgctcccatttatcctcgtgtatgcaagtacaatttttgcgaatgaatatagctggggaacatataaatttttaacgatacgaccagcgagtcgctttaaaattttaacagcaaaatttttagcaattgttatatttgcagctttattatttatatttaatatgatcttctccgctttatgtggacttgttatttataaattccaacagcctgcatggagtgagtttattttccaagatggaaatataataaaacaaaacatttttgtagaagcaagtaaatattatgttttatcgtggttaccaacggttgtgtacgcatcgtttgcatttatgatttctgtgttaacaagatctagtggaggtgcaattggtatttcactattccttgctttatcaggcaatattgcgctattagcagccactagatataactgggcgaaatatttattgccagcaaacacagatttatatagtatttcaaagaatggaagttttattgatggagtaacattcccgtttgcatcatgtatgttgttactttatttgttcgtatttttatgtatttcatatactgtgtttttaaaacgtgatttaacttaataagaaaagccgttcagggtgtgaagtgacccccgaaagttagacaggtcgtttcattaggcagcctctagggtataaataccctatagaatagacttttttcaagtgtctattctatagggtacattttaattggcttgggtgtctttttttataaaaattatttaccatacaaatagcccaacgagcatagcacttaataaagaaacagccatcccgctaacaagaagcttccaaacatttttaccgatgactgatgatttttctccgccaaataatgaattgtaagttccgtaaatcatacctactgtactaaagttagcaaaagaagctagaaatgtcgttgcaaccgcaaccgtatgcggttgtaacgactttaagtttgattttaaatccatcattgcaacaaattcattcgtcgttattttgatccccattaattcagctacatacatagcatcactgcctgataaaccgagtaaaaatgcaaaaggactaaagataatggagaagattttttgaattgttaaccccgttacaaaaaatcctaaaatcccatttaaacatgctgttaaagctacataaccaattaccatagctaaaataacgataaccatattcatcccaactaacatactgtttgaaatagtagaaaagaaatcctttttttcatgttttgaaggtgtgtaaacaacgtcttcttctttcgaaacttccacaggatttaatacattggctaaaattaatgcgttaatacaatttaatggaatggcactgaaaatatatgttgctggcaccattgataaataagcgccaagaatggatccgctaacgctactcatactcataattccaaaagttaataatcgattttcttttaacacagataattgatcacgaacaaccgcaagtgcttcggtgtttcctaaaaacatcatttgaatcgaaaagaaactttctaactttggtaaacgagaaatctttgaaataactgcacctactttatcaataatccaagttaagattccgaaataagatagaatatcgaaaaaagtaataacaaaaatgataggaagtaacgcactaaagaagaaatcaatgtgctgactttccatagctgaaggaaatgcaaatcgaataccttcattcgcacatgctagtagccaactgaaaaatgacgcaattttattaatgataatactgccgagctttgtgcctaacataaaccatgtaataaaaagctccaataggatgagaattacaattggtctccattttatatgttttttattaggcgaacataagaaaacgattaatatgacaacgaaaatccctaacatattcaatatgaaatgcatgtcaacaactccttgaggcttattatttgtatataaaaaagcatctattcttccaaatttggattatgattagaagttatgaagcatgtaagttatgttaggaatcaatgtattttaatttgctttattttgagtaatcgcagtaattatcgaacaattagttgttttcaattgttttgttggatattaaacgtatgcgattttaaacatcgtttatcccggattaacgggcagtaagacttttacctcaaaattcagggaaagcaaagaagtggggatgggctgcccgcaaaatcccgattggtaagagctgattaaaatttcactttataaataagaacggtgagttggccatgaaccttgaagtttccgaagctgtataatttgtcctgtatgataagcatcatgcaaaaggatattcatatattgttgccaaactggtagagaaggacttagttgatctagttctgcttcttgaagggcggttaatgaagattgtaaggcatcatgtacttgaagcgttcgcttttctcttcaataaaccttctctatagttgaacaagagagtgaaatacaacgtataattgagccattaaaaaatctcatttttaatatgatatttaataatcaaggctttcattgagtcagaatgaaaagagtataaacctttttctgtttgctcattgattaaagttttttttaagttgcaaaacggttctaaaaatatagaaggtaaaattcgataaaaatagaatatgttatatagcaaacaaggaggggataaaaatggaggtctatcatataacgagcagaaaaagggaaacatacaacgttcaggtgaaatattcgatacttttcgagtgtgcacttggcattgcagcgattactcataaaaggttaattgatactcttgaaaagactcaaagtgaatgggaagaaattaagaaatcattaacagaagaaatgagagaacacttacagtttgtagaagaacataatacgtggaaagcgttactccagttattgtatgaagaggattttcaagatttatcgcagtttaattttaaaattgattcactttcagaagaagatttgaaatttatatgtttaccgtttttaggagagaagtatgaagagaaaagacgtttagctgcaacgggagttgtatgtgcaatacacgaactaaaggaactaacagataatcatcagtttttttctacttatattagctttatatgtaatgtagatgtacaagtgctgaaatcgcatttaatcgctgttatgacaggttggtatgagagtgttattaaaagagaggaagaacaaatactttctatattaaaacgagattatgaagcaaaaaatgaaatgaataaaaagatgaaaccagaagagtttgttgagtgggctactggtggcattaactatatgccagaaccaagtgttcattacgtgcttcttatcccgcaaatgacgtacagaccgtggaatattgaagcggatattgaagatacgaaagtatttcattatccagttgcgaatgaaagcattcatcctgaagatccgtatgaaccgaattattttttagttcaaaaacataaggctcttggggatgaggcgagattgcgaattgtaaaaatgttgtttgaaaaagaacgtacattacaggaaataacggaaagattacagcttggtaaatcgacagtacaccatcatttgaaattgttacgtgcagcgaagttagttgatatacatgacggaaagtatgtattaagaaagaaagcagtacagtctttagcgaaagaattagatatgtttttgaatagataattaacaacgagaatgtacataaagggaggaatataaaagaaaagttggtgtgtgaaattgaaaaatatattgaaaaatcgttcgtacttttttatgtggattggtagtgcaatctctgaattaggaggggctttcggaacgttatgtaattcaattctagtatatgagttaacaggatcggaaatggctttaagtagtatgtggctattatatttcatcccatcactcatactgcaattaataagtggcccatttattgataaatggagccggaagtggattatgattttttcacaatggatacgggcgtccgtattcttattacctttggtgatgctagttacaggtagtatagaagtttggcacatttatgttgttcaaattgtagtgggacttattacacctctttatacacctgcgagtcaggcaattacaccgagcattgtaagtcaaggacaacttcaagacgcaaatgcgtatattgatggaatgactcgtctcatgatgtttcttgcgccagtattgggcggagtagtcattcatttcattggaacagaacttacattatctttcgtatgtatttgtctatttgttagtggtgctttcttactttatataaaagaaaagaggactacaacagatatacgaaaaacgtggctagaacaatttcttcaaggttttacatatttttttacaaaaccaatcatcgtttggctcggtatatttcttactttcgtgcagtttggagtaggggtaacgatggtcacaaatcttccttatataaaagacgagctgttagcgggatatgcagagtacggctattttatggcaggttttccacttggctacgtaattggctcagtattagtgggaaaagtaacatataaaagccggcgtatacttatgcttggaggattgtttataggggggctcacatacatttcattagggttcaatcatagtattatcattgcaataataattgaagtaatagcagggatttgtattgcatttttcaatgttcataacacaacaatatgccaacaaatcgtcccaaataatatgataggacaagtattttcagtgcgtttattttttatacgatccgctatgccattaggtgtgttagtagggggaatattgagtgaaatgtggggagtaagagcgctatatgtaattatcggtgcaattatatgtgttacatctttaatagggatgttatttccatatttcaaatttttagatgaggcgatagaaaagaaatcagcataattcaaaaaattaaaactttacaattgaaaataattatcataatcaattataatagaagaatactagtattcgtattacaaagagggagtgggatatatgtttatcgaaacgaaaacatttacagtaaaagaaggcacatcaaatatagttgtagaacgtttcactggagaaggtattattgaaaaatttgaaggctttatcgacttgagtgttcttgtgaaaaaagtaagacgaggagacgaagaagttgtcgttatgattcgctgggaatcggaagaagcatggaaaaactgggaaacaagtgaagaacacttagctggacatagagcgggccgtggtaaaccgaagccagatcatattattaatgtggatcatgcggtttattatgtgaaatcatcgaaatcggcttatcaacagtcgtaatatataagtagaggatacatgttgtagatgctaacatgtatcctctttttgtagtaatgggggatggaaatgatggagagtttttcattcattacaaatgaaaaacataaaaaattggtacaaacaattttaaatgaatatttatttagagataaagtaaatggattcatgctaattggatctgtcgcaagaggtgacgcatatcctgattcggatttagatttctatattcttttagaagaagggcaaaagaaaaaatttcattttgaaacgagtgatgatattttagttgaatataagagtgcagattttaatcaaattcaagtaaactttaaaaacaatccgatggaattttactcatttctagaaggggaaattttgtttgataaaagcggtgagttgaaaaagttaaaggaaatagctacatatgaatttgaaaactatcgtgtttctagcgacaaaatgaagggcatttctcattggttgcatagttcattaattaaaattcaatctgccttgaaagcaaatgatgagttaaaagcttcatacatagttcaaatttcaacttggacattgttagatgggatatgggctgttaataataagcctataccaccagcgggatctgttttgaagtatattgaaacattatctaaagtaccaactcattttaaaggttttatcaataaactgtttttaggtgatacgacagaacgtacctctgcagcaattttcttgattgagtgggttttacacaatttgaaaaataaataatgtggctattttatataggtaaaataatatttcgcgtcgaacagtttatggaattacagtcataaaaaacgttctaggctatagaaaaaaatattagacttataaagcatagtcttagatggaacgcttgaatatcttgccttacatatttaagtgttatgaaaatgaatccatataccctctgtttaaaaggagatgagtacatgaagctgaatcatttaaatttatgtgttgatgatttatcggaagcgagacatttctttgaaacattttttgattttcaatttttggagcaaaaagggaaagcacttgtagtgatgagtgatgagagtggttttatacttgtactaagtgatccaaaagcatttaaagggaataaggaagttacgtatccggaagcttttcatattggttttttagtggatacatcaagtgaagtggatcaagcgtataatcgtttagtagccggcggcattgaaatagacaaggaaccttatttgatgcgaggtagtagttatggtttttattttacagtatttaatggcttattaattgaagtgtcttgtcttgattatagagaaggtaagaaagtttcaaagcttaatagtaatcatctagagtaatcatttgaaggtgtatagaatttaagtatgtatcatattagaagacggattaagaaagtttcactgtaaagtaaaaaagacagactaataaatagtctgtcttttcacattaattcttcacatcatcataaagttcaagtgcctctttcacattcaatccattttttacaatgccatgtattgcttgaatcatcgcagctgggtgctcggattgccatatgtttcggcccatgtctactccaattgcgccttcttgcaacgcattgtacgtaatgtttaatgcgtcttcaattgaatctaattttggtccaccagcaatgacaactggggcagggcatgtgctcgttattttttcgaatccttcacagtaatacgttttaataatatcagcacccatttcagcacatacgcgggaagcaagtgctagaaagcgagcttcacgtttttgtaattcttttgcgactgcggtaatgccgagtactggcaggccgtaatcatgagcttcagaaactacatttgcgagatttgtaacagtttgtgtttcatagtctgatccaatgaaaacagaaacgccgacgccaattgcgttttgttttactgcttctttcacaggtgtaacaattgtttcattcgctaaatctttaccgacgacagtagcgccgccagatacacgcataaccatcggtgtgctgcagttttcaggaatacaggagctaagtacaccacgcgttaaaaagagagaatccgtgtaaggaagtaagtttttaacagtttcaagtggctgttcaagcccgtgaattggtcctaaaaagtagccgtgatctatcgctaacattaccgctctgccatcaggtaaaattgtatttaatcgatttttaaatccccaagtcattccaaatcactccttcgttaatgttggattttccgtttgtaccgtatctttatttggtaaatgtggtgactttataaaaacagctttaaaaggtttgtcagaatggttaatcagatagtgagattcatgagggcgaacttgcaggacatcaccttgtttaattggaactctttcgttatttacatagaagtctatttcaccttctaatgcataaaagacctcttcgcacgtcgtatgataatggttttgaaactcctggcccggttgaatgacaacaaggccaagatcaatatttggaccttgtattaaatatttcggcccgttatcaccgaagcgataggagaagtcattttcattcgcttttaacatacagttcactcctttatgtaatgtgttacagtgcaccaggcgcaatccacatatgtgaggtgagccctttatcagctaaagcgagctgactgtcatatacagttttccatgtttcatagaactctttatatagttcgtgattttcagtaactggttcgaatgtttgctcccactgtacaaactcttcggcagtttcttccatagatgaatatatgccagcaccaactccagcagcaatcgcagttcctaaagcagctgcttctttcacaacaggtacttttacaggaataccgagtacgtctgatagaatttgtggccatagttttcctttagcggcaccgccagcaaaaacgacttcagaagggaatgtaccagtaagattttcaattagttttaagtttccaagtgtaacgaaggcggcattttcttcaatagcacggaacatttccttttttccgcatttgtcagcgtctaaacttaaatttaagaatgaaggtgcggcatgacgccaagaaatgtagttcataacgtttgaaaaagtagggataatgccatgtgaaccgacaggtacgtctttcgcttgttcttctagtaattcataagcatctacaccgagtttatcagcaagtttcttttcttcttggcaaaaagcgtctcgaaaccagcgcataacgagacctgggaaaaaggcgattgtttcatattgccataggttcggaacgacgtgacaatttactcgaatcgcagcatgtggatctgttattggctcagtaacattcacttcttgttgccaaaagctacccccgcatattaacgtttgattcggtttcacgattcctgttccgagcgatgccatttgagcatctccacccccggcgacgacaggaatcccttcaagtaaaccagttaatgctgcacactcttttgtaacgttgccaattactgtaccagcttcatttactgttggtgaaaatggcaaagatagaccgcactccttagcgacatcgttatcccacactctattttgtaagtcaaaaatacctgacgtgcatccgtttgagggatcaatttgtagtacgccgcttagtttatataaaatccaatcgtttaacattgtaaaagagtaaatattattatagacgtcgggttcatgtttttttatccagagtaggcgtggtaaagcacctaatgaaaaagtttgaccagactttgtatataaatctttttcaagatgtgaccgaatttcttttaattcactaacttcgacggatgcgcgcccatcaacatttgcacacgcccatatttcttgcccatcttgatcatataaaacaaatccttctcgcatacttgtagcgctaatagcaagaatagaagaggcaggagtgttgcttttttgaagcacctctttcgtacattcttgtactagcttccaattttctactacatcaaagttcatagagcctggataacgaaggtcagatttgtgaatccattctttttgacttactgcaatttgattaccatgtaaatcaaaaagaactgctcgaatgctccctgtaccagcatcgaaagctaataaatgggacattaacaatcaccatcctttcgtaataaggagagggcagtttcctcatcggtaattaatgtatgaataaactttccttttaaggcaccataaattgcatctatcttttctatacctccagcaacaccgacgacatgattcatattgcgcaaaatagagagaggcgtgccaattagacgattatgatgcgagagctctaataactcaccattcgtattataaaactgtcctaaaatatcgcccgccccgttttgacttcgaatatatgtcatttcacgtagcgttaatttttcttcttttacaattgtagcgtcttgagataacccgccaataccgacaactgctgtatgtgcaagtgaagcgacatgaagcatatctttcacacttggttctgataaaatacttcgtgccatttcagtagaagatgctagaaaaggagtaggaataatatgaagatcaccttgcatgtagtgtaaatagttttgttttcttgggagatagtggtttactccgcctgttagcgttacgaatgaaagattaatagaactttcaaaatgaatgttttctagcattttacttatcgtttcaccccagccgatgccgagtaaatcaccttgttggagatgagtttctaaatattgtgcagcggcttttccgagagaagtagcataattgtttattggagtagggataatgaaagcatcttttaagtggaactttttcattaagtcacgttcaatgctcaagcaatgcaaaccggttccttttacgtgaaatgtaacgataccttcactgcgtgccttatctaataaccggacgactttatttcttgaaatatgaagaagtgaagcaatctcttgttgtgttaattgatctttataatagtaccaggctactttaattaataaattttcttcaaagttcagctgtgacatactcttcatccctttcaacaattgaccaatgcttaaacatatgtgtcacatattttgtttattccagttgaaacgattaatagtacattgaaaaaagtgttctagatatgaaaaaaggaatatacaatgctacaaaacaagtagaacaaataatcattttctcaaaaaatgttctgggtaaaggcaggtgacatcatgtggagaatgtgcccttattacaagtgaagaaaatgagtaaggcgttttcgaatcaacttgtgctaaaggaagtgaacttacaagtagagcatggtgatatatacgctttagttggtggaaatggcgccgggaaatcgacattaatgaaaatattaacggggttatattcgtatgatagtggagaaatgtatgtgaaaggaaagagacagcagtttgcaaatccaaaagaagcacaccaagaagggatttatttaataccacaagaaccgctcatttttccgcatatgaccattgaagaaaatatatgtattggattaaaggggaatagaaagaagcttaaagtaaaagttcagcaattaattgacagtttaagttgggatattgatcttaatgaacagggagaatcgttatctattgcgcaacaacagttagtagaaatcgttagaggattaataagagaagctgagattcttattctagatgagccaacatcgacattaacaacacacgaaattaagagtctttttgtgttgatgaaaagtttacaagaaaaaggaattgggatgatttatattacgcatcgttttccagaaatctttgaaattgccaacaaagtagcaatactacgtgatggaatggttgtaagccaaggtgatgtatgtgactatacatatgacatgctgatggagggactattgccaaaaggatataaacagaaagagaaaatagaagtagttcaagagacagcaaagacgaaaaaaatattagaagtggttgatataaatggtcacgcattcgaaaatatatcattcactgtacatgcgggtgaggttgtaggtgttgctggcattataggatctggcagaacggaattagcagaagcgatatttggattgaaaactataaaatcagggtctatcttattgggtggaaaatcaattgatacgtgttctttgcataaaaggctagacgaaggcctagtttatgtgccagaggatagagtgaggaatggaattttctcaattgcttctgttaaagaaaatattgcagcagcaagtttatatcaaaataatcgcttttttataaatcaagaaaaagaaagcgctttagttaattcgtttatagaacagttccgaattgttgtacagaatatgaataaagaattggcatctttatcaggaggtaatcagcagaaggtcgtgcttgcgaagtatcttgcatgtaatcctaaaattattattcttgatgagccgactcgcggaattgatgcgaaagcaaggcttgaagtgtatgagacgataaaaaaaatgaaaagggaaggactcgcaattttattaatctcttcagatgttgaagaaattatccaattagtaaaccgtgtatatgtaatgagaaatgggcgatttgtttctcatatggaaaaagaacaactgagtgtgaatgaagttacacgccttgcatacggaggtgtaacggaatgaaacgtatgtataaaatgcacgaaacgtctatcatactgttactactaatttatatagctactgtagggatgataaaccctagttttattcaatttaactcgttatctttactgatgaaatcaagcgttattttagtcgtgctagcaatcggtcaatcgtttgtcttatttacgaaaaatatagacgtatcagttggctcaattatgggattaagcgcggcagtttgcgggatgttgttaacgaacgggtataatgcattcttgtcaatttttgctgctgtaatgcttggtgctagtattggtttcataaacgggattggcgtcgcaaagtttcgggtaccagccattattatgacattagggatgctaggaattgctaggggggcaatgttaatcttcacaggcgggaagtggattgaagatattccaaacgattttaagcagctgtcatctatcatcattcttggtttacctataactgtatggttcgttcttattattttactactactatacttctttttaagaaaagtgccattgggaagatacttttatgcggtaggtgataatgaagatggcgcgaggcttattggtatacctgttaataaagtgaagatatatgcgtttatgatttcaggcataagcgctgcgctcgctggttgcatatttgttatgaatatcgggttcgtcccaaatcaaacaggtacaggattagaattacaagtaatggcagccgctgtactaggaggaattcatttaaaaggaggaacaggatctttatttggagctgcattaggagcgttatttttagaaacaataagtagctcactcgtctttttaaaaataccagcattttggaataatgctatttcaggttttttactattacttattatcatattagatagcgtcatgaagaggtggaaagcagaaaggaggatgaatctatgaagtatttttacagatgggaaggtgtgttaatcatattacttcttatagaattcattctctttagttttataaatagcgatttcttaaatattagtaatctcctttttagtacaaatgatttcctatttatcgcaattgcggcgataccaatgacttttgttatagtaacaggaggaattgatgtatctgtaggatcaattatggggctaacctcgattttaattggtgtgttttggatgaatgggattcatattttactagcagtaataatggcacttatagtcagttgcttagcaggagctttaaatggactcattataaaaatgacagatgtagagccactagtcgttacactcggaacgatgtttttatacggaggaattgcgcttgtcgtttcaggaggggcaggtgcttctggatatgaagggataagcggtttacctgatacttatgtacaactagcaaatggtagttttataggaatacccaatttattatggctacttattttattaacaattgtatgcacgattttgtttcaccgaacgatatatgggcgccacgtacaattaacaggtgcgaatgaaaatacagcaaaatacaccgggattaagacgaagaaagtagtaatcattgcttacatactttctgggttaggaggtggattaggaggagctttcttaactgcatatttcggttctgcacgtgctgatataggaagcgaaacaatattaccaatcattacagcagtcgtcttaggcggtacacttattacaggcggaaaaggaagcattatcggtactgtactggcgagtattttcattgggctcatgcagtatggcttgcaaatgacgggtttaacaaatgaacaatccaatgtagtaataggtattatccttattctttcagttattatgagacatttcaaattacatcaatttttagcggggaaaagacagagtttgcataagggggaaatgtcatgaagagaaaactagggattgtattgatcgtatgtatttgcctaattggtttaatagcttgttccagtcaaacggcagataagaaaaaagcggatgatgtgaaatttgcatttattccgaaattaacaggagttggcttctttacatcgggcggtgaaggggcaaaagagatgggagataagctaggcgtacaagtgaagtatgatggaccgtctgaagcgagtgtatcagggcaagtaaagtatataaataattttattaaccaaaactatgatgcacttatggtttcatctacgtcagtggaggggctatcgcaatcactgcaacgtgctaagaaaaaagggatgacggtgttaacatgggattctgatgtgaatccgaaagatcgttctttttatataagccaaggaacaccagaccaacttgctaacttattaatagaaatgacttctaagcaaattggagataaaggaaaagtagcattcttttattctagcccgacagtaacggatcaaaaccaatgggtaacgaaagcgaaagaaattattaaaaagaaatatccgaactgggaaattgtaacgacgcagtacggtgaaaataatgcacaaaaatctttatccgtaggggagaacatattaaaaacgtatccagatattaacgcagttatttgtccagatgcaacagcactcccagcaatggcgcaggcagctgaaaacttaaaaatggataaaaaagtagtggtaactggattttctacaccgaacgttatgcgtgattatgtaaaacgaggaacagtacaacaatttggtttatgggatgtaaaacaacaaggtgctctcgcaacgtatgtagcaaatgaaattgttgtaaaagggaagaagttaaaagtaggggatagcttcgaagtaaaaggaattggaaaagtgaaagtagagccaaactccattcaaggatatgattatgaggcagaagggaacggaattatcgtattaccagaacgagttgtatttacgaaagataatattgataagtataatttttagtagacaaaaaaacgtccgaatatatcggacgtttttttatttctgcattaattatgaacagtttctttttcgtttaatccaagtgtacgaccagtagaagtgtgaagatcttggaacaatcttggattttcagttagtgaaatgccatatgaaggaatcatttcttttattttttcttcccattctaccatgcggcttgggaaacatttttctaatacttcaagcatgacgtgaacagcagtagaagcacctggtgatgcgcctagtaatgcggcgattgagccgtcagctgcacttactacttctgtaccaaattgaagtgttcctttaccgccagcatcagtatctttaattacttgtacacgttgtccagcaactacaatatcccaatcttcacttttcgcgttcggaatgaattcgcgtaattcttccatacgtttttcatgtgataacataacttgctgaattaagtattttgtaagtcccatttcttttacaccagcggctaacatcgttaagacgttattcggttttacagaaccgattaagtcaagatttgagccagtttttaagaatttaggtgagaagcctgcgaatggtccaaacagtaaagcttttttattgtctatatatctcgtatctagatgaggtacagacattggcggagcgccaactttagctttaccgtacactttcgcatgatgctgctctacaactttttggtttttacataccataaatagtccacttactgggaagccaccaatatgctttgattcagggataccagtcttttggagtagaggtaggctaccgccaccgccgccaataaagacgaatttagcagtatgatgctcaattttaccactattcatatcgtgtacttttacttcccacaaaccatttttcgtgcgcttaatattttcgacactatgcttgtagtttagctcgacattttttgtttttaagtaatcaaacaacatacgtgttaatgcaccgaagttaacatctgttccagagtcaatcttcgttgccgccatcggttcattagatgtgcgaccttccataatgagtggaagccatttttttaatgtttcaggagcatcagaaaattccattccttgaaacagtggattttttgaaagcgcttcaaaacggttttttagaaactcaacatttttttccccttgtactaaactcatatgaggtagtggcataataaaatcttgtggattacgaattaatttgctctttacaagatatgcccaaaattgtcttgaaagctggaattgctcattcacttttacagccttactaatatctatagatccgtcagctttttcggaagtatagttcagttcgcatagcgcagaatgccctgtacctgcattattccattcgttagagctttcttccccggcacttgcgagtttttcaaaaactttaatttcccattctggtgctaattcttttagtaatgagcctaatgttgcactcataattcctgcaccaattaagataacgtctgttttttgctgcatgttgctcatgataatctctccatcccctatattggcaaaaaagtgtaggtgttttctatgtctaagccgtaaaagagaaacaccgcctaggccccacctaggtgtataccttttttgtctcaattatataaccatctcatactctattataataattaatagactaaaatatctagtgttatctgataattttaaactatttaacgttttattcgctaaaaatcttatttaacaagctcttttaaggtggtaaatagaaaaaaattacagtttaaaattatctcgaaaaagcttacgtatccttaagtgactaaatcgagtacctttttatgggattattctttccgtaatggtaagattattctgaaaaataaaaaggagggactctaatgtgtacaaaagaacaaatttcaaacttatttcgaaacttttcaataaaggaatgtaaagggtcaagtgatttatatgaatatttatcaatgaaaattgctgaagatgaggaagtacttacactatcgtcctatgctcagataggtcaaccagtcccaaacttactattaggtgcagtacattatttattgctagcagggaaagaacatcatttaaaaacgtattatagtagtttagttgaaaatgctgatacaaatttagataaagcttttaatcattttaaagatttctgtaaagagtaccgagaagaaatcattactttgttacaaacgaaactcgttcaaacaaatgaagtaagacggtgcgcatacttatacccaagtttctgctacatatttaacaaagtgaagaagccgttagcgttaattgaaattgggacaagttctgggttgcaactgttctgggaccaatatcgttattcgtacgggacggatgaaatgtacggaaatatagattcaaatgtgcatgtaacttctgaaataagaggggagaatgtgccgcattttctaaaagaaagcccatctgtcgtagaaagaatcggactggacttacatgtgaatgatttacataatgaggaagattatttatggttacgtgctttaatttggccagagcataaagaaaggtttgagatgtttgatcaagctgcatctttagtgaaaaatgaatctgtccaattaatagaaggagacggtgtagagctattatcatctattattgaacaaataagtgaagaagctgttatttgtattttccatacacacgtcgcaaatcaaatacaagaacaagtaaaacataagttagaaaaacaaatacaagaaattggcgcaaaacgtgatgtattccacctgtataacaacatgtgggatcgtgaccttcatattgattattatattaacggaaacgaatatcgtgaaacggttggagaaacagaagggcatgggagatggtttagctggaagattggaaatgagacgcttatttagattaataggggcgccctcacttgtaaaagaagggaccataggctcaagcattgactaaatggttaaggaataaatgtattagtaacatacaaaaaatgcttcggagaaatcctaagcattttttgaattacatttaaaccccataatggatcatgtacttctgttctgctgtagcttgtacaatttttgaagctaactcattcagctcatcagattttctgaagaactttgaagatgtaactgtttcatagaaaattgctaaagattcagaagggataattgtaatccatcaacttgtgatccgataaagagattttttaacactttttcagcgtaaattttatcctctgtattcattcttgaattcctccttttcataaaaatataccttatatttttattgtaataaataaattttcatgtaaaatgaaccttttgtgaaaaacgagcgaatatagtgtgaaggatcatgagaggggaacggagctttggatgaagtacaattaaaagaatggctatataaacgaaagtatgttgtccaaaaaagagtttgagaaagtgttactttggattgttgaatagatatttagtaaaagaattaaccaataattatattatgtaaactttatttataaaacacccatttaaaaaatggatgttttatattttaatatattaggtgtaatatatagtttaaaaaagcggaatactttgcggaaagttaaaaatatttttcggatcatatttcgcttttacttccattaatcggtcaaagttgcaactgaagtatgcatctggccaatttttaatggataggtcaggcgtattaacgtagacaccttttgtaaatggaagcatcgctaagcggaagtcttcaacccatcgaatacttccagcggcaccttctggttgctcccaagtagcgaatattgacatgtttgatagtgcttttcggtaaaagtaagcagttgcctcatttggcacctcagcaacagcaccgcctaatccgtggaaaaatacggaggtggtggaaaagggaggtgcattattaataaagtgatcgataatggataatccttcttctggtaatagttcatatacatatggaccaacacttttaaatggtaaaggtgttgcaggttgcttttcagctattttcgctgctgcttctgcccatggtatttcttcgatagttacttgcattggtgaaccagcttctagtaatggctgtagtagcgactgcaattcttgtacagaaccgagaaatacaccttgcattaataatgatggttctaattctgcagacataaaaagagtagttgtaaatcgtttattagcgcaaggtagcgtatattcttgccaagaggttaatacaggttttaaatctgatatcccccagcttatttctgcaaatcctaccgtattaattttatgtgttcgaaacttaaacgaagtacatattccaaagttaccaccaccagcaccgcgcgaagcccaatagagatcgtagttacacttggcgttagcgcgtattatacaaccattcgcgtctaccatttctaattcaagtaaatgatcgagagttaatccaaacggacgagagagaatactatgtccgccacctaaagtaacacctgcaatcccgggagtaggacaaacaccactcggcacaactaacccttcagctgcaagtgtttcaattaaagaaatatttctccatccagtcccgatagttacagttccattattgtgatctatttctaattgtttcatttcacttacatcaattacaagaccagcattactgacggataatgcctcataattatgacgtccagagcgcatgcgtataggaacgttatgtagccttgaccagcgaacagcgtttactacatcctgcgtattttgagcaaaaacaatgattaacggaaatttgttgaagaatgtattgaattcttcacgcgctgaattataatcaggatcattaggtgtaacgatacgaccagtaagttcaattttttgattattcatttcagtcatctctccttgacgtgaaatatttataatgtggaaatacagaacataaagaagaactgacaatactttataagtaaatgaataaaggaaaaggattattccaataaagaaaaaggcagtgctacataagtagcgctgcctttttggaattatatgtatgtgctcaaaatttccccaggtaatccatcaatctcacaaactttctccgatgtaaaacctacacttagtaaaattttgcgagaagggatattattcggatcgataattgcttttagtacgtttacatctgtttgcttcgctattaaagctagttgttaatttttgattatgtacgtacatacaatatgtaattaagtgaatgaccatcatagtaattacagaaaagggtgaatacagcatatgaatcaatttgagcaaatgatgtacgttggtgtcatcatgtctattgtactatctgtaatgattttagggtccttatattataatcctcgactatcgttaactgattatccgaaagatattcaaaaagtagtttttccaaaatcgattcatgaaaaaaagcaaagcatttattttaatattgtatataatactattcttttcggtagtcctttcgtttctacatatatactacataagcatgaaaagttaatgtatatggatgcctatttacacacttttggtattttaatgattttcaatttagtagatttacttataattgatttgctaattttttgctggattactccaaggtttgttgtgattcctagtacggaaggtatgaaaggatataaagattataagtttcatttaagaggggctattgttgctactcaaattttagcaatcgtaagtttatttttggcgggaattgccacaactatttagtgtgaagaagggtatggagcttttataaaagataaggagatttataatatatagaattagaaatgagaatttgatagtattggagtaaggagttttaataacagtatattaaacaatattaatataccgttgcaaatgttttgatattatgtaaaattatacaattttacggaggcatttgataaaattcaaaaaaatttaatggaggttaatatgaaaaaagtaattggcgcagcaacagcaactgtttttggattgggagcgtttaccacaactgctaccgcagaaacaatcgtaacagcagatgtacttaacgtacgtgaaaaaccgactacagaatcaaaagtggtcgaaaaagtaaagaatgggcaagagttaaaagtcataaataccgaagatggctggtcaaaaattgagttgaatggtaaagaagtgtttgtaagttcggagtttacaaaagatgtatatcatgtaacggcgaatttgttaaatgtacgcactgaagcaaacacggattcagaaattcttggcagactaaaaaaagatgatgtaattgaatcaacgcatcaagtaaaagacggatggctgcaatttgagtataaaggaaaaactgcttatgcaaacgtttctttcctatcaagtacagcaccaactgaaaagaaaactgaagagaaaacgaagcaagtagcgaaagtacaaaaatcagttaaagaaaagaaagaagtaaagacgcagaaagtagcaaaagcgaaagaaacaacgaaagcacaagaaatagtaaagcctaaagaagagttaaaagtcaaagaagaagtaaaagttaaaaaagaagagaaagcgcaagaaatagtaaagcctaaagaagaggtaaaagtcaaagaagaagtaaaagttaaagaagaaccgaaagtgcaagaaatagtaaagcctaaagaagaagcaaaagtcaaagaagaagtaaaagcgcaagaaatagtaaagcctaaagaagaggcaaaagtcaaagaagaagtaaaagcgcaagaaatagtaaagcctaaagaagaggcaaaagtcaaagaagaaccgaaagcgcaagaaatagtaaagcctaaagaagaggcaaaagtcaaagaagaaccgaaagcgcaagaaatagtaaaagctaaagaagaaaaagcaagagaaatagcaaaagctaaagaagaagaaaaagcaagagaaatagcaaaaggaaaatgtacatatttattcaagcgttaatgtacatatttaagttagcatttatatgcgatatggagtttggaaaaagaagaagcttttttaagaaaaatgcatcaaaaaggatgggctttacaaaagtataatgtaatgtatacgtttaagaaaactgaaccaaaagatgtagtatataaagcggattttagactggattataaagattcaaaagaaaaacaaaaagaatatattgaaatatatgaaatgtgtggatggaaacatgtaacgagttttgcgaagtggaattatttttgtaaagaagtagacgtggaaaatgagttacctgatatttattcagacaaagaaacgaagatacaaaaatttgttgaattgatacagttcgttgcaattatgtttgtaatgttaattccagtgctttacttatgttttcttggagtatcagaatcaggattatataaaggtatggttgggtttttagtttgtatatatttatatgcgtttattaatttatttaggaagattaaaaagttgaaaaaggaaatattttaacaaagagtgatattcttagagaagattattgatgggaatcaacttctctaatttctatatatatttattttgttcattcttttttatataataaaagaccaactttttaattcatagaactaacagttacaaagataatataccataataccagtaacaacacctaaaaaaatcataaatgaagaagaaataatcaataataacgaactagcaattaatattaatttaatagatttttaatttttaaaatggtagtaaagtaaaagactataaatagtagaaacaaaccatattgttagaccgtaaggagtcgttattttctcccaatcgaagatccaaaagtaaaagatgactatatgacaagttaatagtagaaatattgatggaagcgttatttttttattatttgttttacctcgcttatgtaaacattcccaaaagagtgcgaagtttaacatataataaggaagaaatccatttttaattaacttattaaacgaaaaaatcccttatagaaaaatctatttctataagggataatcatgtttttattagaaagactgattttgagcaggtttaataaattgttctgggttttcaacaagcccacatacagcgcattggacgcgataagtaggtccttgataggccatatgaaaagcattcatcgtttcatttgtgtattcttcttctacttgaccagtttgtggatttaatttgactggttttacttgttgctcaagaatattaaagcgggtacggtttgttttacaacttggacatagcattggttccatatgtatacacctccatttgtatcatttcttaaaatctttaattttatgcaagcaaaaaactttctcaatataaataggtgtttaatgtatttaaaattcagaaaaaataaaatataataaaagtacgaactggttatgtccaaaccaaatctcctgttttatgccaataagctggggggccgagaaatcggcctcatttttttgtgctcgttactataagaaacaaggtttttatgagacatttgtcgaaattttagggatggatataaagggggatgtaaaatgaatttaaaaatgaagtacatcattttatatgtagaaaagtttgaggcatgtttaaggttctataaagatattttacagttacctataaaagcagagcacggaacatatattgaatttaatactggaactaccattttagcgatgaatacgcggcaagatgtgaaagaattaacaggactaccgcttacagaaggtgaattacagtcttctcatttcgaattaggattcgttgttgagaatgtacaagaaacgattgagcaatttagagagcaaggtattaaaattttagtggagccaattgtgaaaccgtggggacaaacaattgcctacattgccgatccagatgggaattatattgaaatttgcagttcattagaataaaaggagaaaaagagatggggtttccgagactagaaacagaacgtttacaattaagagaactaacactgttagatgcagaaacaatgttccgttatttttcaaaagaatctgttatacgttatttcggaatggattctttcgaaaatatcgagcaagcgaaaacaacgattcaaacgtttaaaaatcgttatgaagagggcagtgtatttcgctggggaatcgagaaaaaagggacgggccaattaatcggaacgtgcggatttcatttaattaataatcatcataaacgagctgaaattggttatgaattagacgatacatattggggacaaggatatgcatcggaagcgttacaggcaattttaacttacgggtttgaaacattgcaacttattagagttgctgctgttgtatatgtagaaaataaagcttctcaaaaattattaagtaaagcaggatttcaagaagaaggattacttcgaaaacatatgattcaaaatggagttgctcatgatactattttatattctttattaaaagaagagtggaagaagtaatgagtacaaacgaacttataacgattatgaagaagcatagggaaaatagattcattttaggtatagatggtttaagtcgatctggaaaaacaacatttgtagccaatttaaaagaaaatatgaaacaagaaggcattccgtttcatattttccatattgatgatcatatagtggagcgtaataaacgatatcatactggatatgaagaatggtacgagtattattatttacaatgggacattgaatggttaaggcagaaattttttcaaaagctacaacatgaaacaaaattgaaattacctttctttcacgaagaaacagatatatgtgaaatggaaaaagtacagattcctattgtaggcgtaattgttattgaaggagtttttctgcagcgaaaagaatggagagatttctttcattatatggtctatttggactgtccaagagagacaaggtttctacgtgagagtgaggagacacagaagaacctttcaaagtttgaaaataggtattggaaagcagaggattattacttagaaacggaattgccgagggatagggcggatttagtcatccaatgatttgaaaatagaaggtgaatagaatgaatattttatgggattttgatgggacgttatttgatacgtatcctgcatatacaataatgctttctgaaatattaggtgactcagtagaaaaacaagaaatatacaaaaacttaaaaatatcatactctcatgcaattcagtattataatatttcatgcgagcaggaagaaaagattaaagttttgaagggaaaattcacgccaaaagatatgaaaccttttgcaggtgtcgaagaggttttgaaatttgcagataaaaatgtgattatgacccataaacatagggcaggagttatggacattttaaaatattacggctgggaaaaatactttgtagatatggttacaattgacgatggctttccccgaaagcccaactctttagcttataatcatttacataaaaagcataatattgatttagctattggagatagagaattagatttattacctgcaaaagaattaggtatttcaacatgtatgtttcaaggtaattgtgatgtagcggattattctttatcacattactcggagttttttaagatagtgagtgatagagagttttctttataaaaaaagttattaataaagactgaatcttttattttaaaggtacagtctttattttttagaactctttcattttattccgtaataacgggcagcctgattgcttcaactaataatcagtggagggtgaacaaaacctccactgattaaagtttcactttattttctgtatataataattactagagattaaaggataatcgtccatctttattaaggaagtggccagtttattttaactaaattatggttattcatgttaatatgcactcatagctatatagaaggggtggggttagtatgaaaactgaaatagttcctaaaaagaagtacagtataataagctatgtatctttactcatcggcattctgtgttttctattcgtttttataacgccaacaaggatagccaatgcaggtaatatagttggggattatattacaattgcccttacaggtgtaggtatcatgctttcaataatcacaatgacgaaaagaacagagaagaagggaattgctattctttcattaatactgtcctcatcattttttatattttggatcatagcaattatcctattgtttactggccaaattagttttgcgccgtaatgtgtaataaaaagagtccttctcgtatgaaggactctttttactcggtatcttcaggttgatattctaaaatatcccccggttggcattctaatgctttacatattgcttctaaagttgaaaaacggactgcttttgcttttccatttttcaagatagaaaggttagccattgtaattccaaccttctccgaaagttctgttacactcatttttctttttgctaacattacatcaatattaataataattgccatattattcacctcagaccgttaaatcattttctgattttatatctatagcatcttttaatagtctttggagaacggcagcaaagaccgcgattaccattgaagcaaaaatcataatcatcccgataataataatgccaggggcgtcatctctctctgccacgagatagaaaagtagcatacctaatacatataatacactaattgccaatgcgctgtacttaatattttttaaagcttgaacagatagctctgagaatgcgttatttttatcaatatagtttaaaagcttaaatgtttggtacagtgcgaagtaataaggtattgctgttgcgtataaattgataaatacaagatatttaatatatgcaatatctggatataattctgcggcgaaatttcctattttagggactaaaaaaatgcacatagcaagaacggggattccgatcagaattacaacggtctttaaaaagagtgtggatccttgtttcataaaaagcacctcatttatttaatatcttattaatttaacatgaaatttattgtttaacaataaatttttatttcttttaatcgaggatttattgttaaacaagtaattaatgaaaaggatgttaaatcttttttataagataaatgatacatatcgatatttaattaaagaaagagaaagtaactattgttagctttatgagaattgggaactaataaaacatatgtaggttttggtatggaaaaggaaataaggtgtattgaaatgaatgcaaagtttatggaggaacaatcatgttgaattatggtgtgaagatgaaaaagttactattagtgggagctataatagtaagcgtattaagtacggaaagtatgatgaattatcattcggccaaagctaaggtgaaaaaagtagaacaccagcctaaaaatataattatgatggttatggacggaacgagttcaacggcgacaacattggctcgctggtataaaggggcaccgcttacgttagatcaaattgtaacaggaggtgttcgtacgttttcggcggaatcagctattacagactcggcgccagcagcaacagctttagcaactggaaataaatcgaattcaggatatgtaggtgtattaccttctattgtaagttcgcctagcttacagccaataaaagaagaagacaagttacggccggtcgcaaacgtattagaaggcgcaaaacgtactggtcgtgcaactggcattgttgctacatctgaaattcagcatgctactccggccggattctccgctcaccatgtcaatcgcaaacattttgacgtaattgcgaagcaacaagtgtatcaaaatatagatgttgtattaggtgggggaaaagcggcactgctacctataaaaagtaatgggatccgaaaagatggtgaagatttagtaaaggtgattcaaaacaaaggatacgactttgttgaaacgaaagatgcgttattgaactccaaatctaataaaatttggggctctttctcacatcatgctcttgcgtttgatatggatcgtatagcaacaaatccagaacaaccaacactttctcaaatgacagaaaaagcaattcaaacattatcaaaagataaagatggcttctttttattcgtagaaggtagtaagcctgattgggcagctcatgctaatgatccaattgggatgattagtgatgtattggcatttgatgaagcggtagcaaaggcgttacaatttgcgaagaaagatggggatacgatgctcatcgctttaactgatcatggtaacagcggcatctctatagggaataggaatacgaaaaaaggatacaatactacaccggtttctgcatacattgatccattgaaaaaggcgaaaatgacacttgaaggaactataaataaactgaaatctgatttatcaaatgtagaagatgtagctaaactatacggtttggataatctaactcatgatgaaaaagaaaaattaaaagtggcaaaaaagaaaatggatgtaggacgaattcttactacattattggctaatcgtgcaaatatcggctttacgacaggaggacatacaggtgaggatgtattcttacattcttatggacctcaaaaaccagaaggcttaatccaaaatacagacattgcgaagacgatggcgaaagcgatgggctttaacttagaagaagtaacgaataaaatatttttagagagtgaacaagcctttaagaaaatcggtgcaactgtaacagccaacaaaaccgaaggagcaaacccgttactcgtagtaaaacataataaagtagaagcacaattatttggtaacaaaaatataattcgtatcaatggtaaagggtatgaattaagaagtattattgtagagagtaatggaaagtgctatgtaccagaagaagcaattcaactatttgtaaagcattctcgttaaaaaattgccaaccagttaagctaactggtggcaattttttgtgtttattctaaatataagtgttcgaattgttttgtaaagttttccatatgagacttgtataaatgttaaagggaaattatatttttttcttacattaaaaaatttcgttttgtagaataagaagttatacatatagtaaagtctaatgtgttatcaattaatatttacgaaaaatatattaatactttagaatttctttaatgttcattattttttatttaaggttatccgttatatttataatatgtttatttcaatttattgtattgaagctcagttttatataattataaagcaatcatcaaaataaaatctccactagagtaaatttattatttttttgcggaaattattatgcagctaagaaaactgtaatttattgaattagaaatatattagaatttagttgaagaaagagagagggaataaaatgaatatagtgcacttacgtcctaaacagcggtctaagtatcgcattatgctagggaagtggtattactctacaaagaggtacattcagtggttagcagacggaaaaacatatgcaaaaaggtttcaacaagaaaagctaccttgtacagcaattcagcaccgaacgatattacttcgtaagctcaaagatgtagatatgtggtatcaacagaataaggttgttaatttgaaaattgctgttaaaaaactaaatggtatcgtcattagaccgggagaaacattttcttactggcgtttaataggtaagccaacgaggaaaaaagggtatgtagaaggtatggtattacattacggatcttttcaaacaggtattggaggaggtctttgtcagctttcgaatttaatatattggatgactttacatacaccactgacagtaacagaacgatatcgtcatagctttgatgtctttcctgactctaggcgcactcaaccgtttgggagtggggcgacttgttcctataactatttggatttacaaattaaaaatgaaacggaccaaccgtatcaacttcacctttatatgacagatgaacatttagttggtgaatggagaacagtctatccgcaactttatcaatatgaagtgtatgagaaagaacactcaattcaacctgcatactggggcggttatatacgacataatgtgattcaacgtaaagtatataatcaacagaaacagttaatagaagatcaatatgtaacagagaatcacgctataatgatgtacgaaccactattagcttgtaataatgagaatagtgagtaatatggtaatccatagattaaatagtatagaaaatatttaattcttatttttattaaaaaagcatgaatcccagatttactgggttttgattgtaactaagaacatataaaagttcactgttatttataggagagtctgtttgtttttatatcttatgtatttcaccctgcataaaaaaatatttctcaacattttatttgttgaaaaatattgaatattcgtattataacgaatattatgttgttatcggcaaaaaacgataatttgcagacactggggaggaaatacattgaaaaagaaaaagaaattaaaaccattagcggtattaacaacagcagcagtactaagtagtacgtttgcttttggaggtcacgcagcgtatgctgagacaccaacatcatctctaccaatagatgagcacttaataccggaggagcgtttggctgaagcgctaaaacaacggggggtaattgatcaatctgcatcacaagctgagacttcaaaggctgtcgaaaaatatgttgagaaaaagaaaggggaaaaccctgggaaagaaatcttaacaggagatagtcttacgcaagaagcctctgactttatgaaaaaagtaaaagatgcaaaaatgagggaaaatgaacaggcgcagcagcctgaagtaggcccagtagctggacaaggtgcagcattgaaccctgggaaattaaatggaaaagtacctactacatcagcgaagcaagaagaatacaatggagctgttcgaaaagataaagtacttgttttacttgtagaatttagcgattttaaacataacaatattgatcaagagccaggatacatgtattctaaggactttaatcgtgaacattatcaaaaaatgttatttggtgatgaaccatttactttatttgatggatcgaagattaacacatttaagcaatattatgaagaacaatctggtggtagctatacagttgatgggactgtaacagaatggcttactgttccaggaaaagcatcagattatggtgctgatgcgggtactggtcatgataacaagggacctttaggaccaaaagatcttgtgaaagaagcattaaaagcagcggtagcaaaagggataaatttagcagactttgatcaatatgatcagtacgatcaaaatggtaatggaaataaaaacgagccagacggcattattgatcatttaatggttgtacatgctggtgttggtcaagaagctggcggcggtaaattgaaagatgatgcgatttggtcacatcgttcaaaattaggttcaaaaccatatgcaattgatggcacgaaatcttctgtttcgaactggggcggaaagatggctgcatatgattatacaatcgagcctgaagacggagcagttggtgtgtttgcacatgagtatggccatgatttaggcttaccagatgaatatgatacaaagtactcaggacaaggtgaacctgttgagtcatggtctattatgagtggtggtagctgggctggaaaaattgcaggaacagagccaacgagtttctcgccacaaaataaagagtttttccaaaagaatatgaaggggaactgggcgaatattcttgaagtagattatgacaaacttagcaaaggaatcggtgttgcaacatatgtagatcaaagtactacaaaatctaaacgacctggaattgttcgtgttaacttgccggacaaagatataaaaaatatcgaatcagcgtttggtaagaagttctattacagtacaaaaggaaatgacattcatacaacacttgagacaccagtatttgacttaacaaatgcaaaggatgctaagttcgattataaggcattttacgaacttgaagcgaagtatgatttccttgacgtatatgcgattgcagaagatggaacgaagacacgcattgatagaatgggcgaaaaagatataaaaggcggcgcggatacaactgatggtaagtgggttgataaatcatacgatttaagccaattcaaaggaaaaaaagtaaaactgcaatttgagtacttaacagatattgcagtagcttataaaggatttgcgttagataatgcagccttaactgtagatggaaaagttgttttctctgatgatgcagaaggtcagcctgcaatgacgttaaaaggctttactgtgtctaacggatttgaacagaaaaaacataattactatgtagagtggagaaattacgctggttctgacactgcgttacaatatgcacgtggcccagtatttaatacaggaatggttgtatggtatgcggatcaaagctttacagataactgggtaggcgttcatccaggtgaagggttcttaggagtagtagattctcatccagaggcaattgtagggacattaaacggacaacctactgtgaagagcagtacgcgttatcaaattgccgatgcggcattctcatttgatcaaacaccagcatggaaagtaaattcaccaacacgcggtatctttgattataaaggattaccaggagtggcaaaatttgatgattctaagcaatacatcaacagcgttattcctgatgcaggacgtaagttaccgaagctaggactgaagtttgaagtggtaggccaagctgaagacaagtctgcaggtgcagtttggcttcatcgataaaataaggtaaaaagaagagaagctgcgataagtcggtgaaactgactgattgcagcttttttcttcttgtgaaaaaactcgctgttttttatgtacttattggaaaaatatgaagtttctttgatacataaaatgctccgtctgtccaattatagaagctattttggacgtaagaaatttgtaagtaatgagtaagaaaaaagagattttcatagtataaaatatttattatagctacttttaacacctgctactaatagtgtgctataatatgaattagcaacaaaaaggaaaggaattagaacaatgaccttagaaaatactaaaaatttaaaaaaacaagttgctccttttgaaaaatcaatgattaaaaaaagtgtttggcaactgatcaacacaatcgtgccatttattattttatggtaccttgcttataaaagtttgtcagtttcttattggttaacattagttccagcactgttagccgctggatttatgacaaggattttcattatttttcatgattgtacccattattcattctttaaaagtcgacgtgcaaatagaatagttggaacgtgtatgggtgttttaacattattcccatttgatcagtgggggcatgagcattctattcaccacgctacgagtggtaatttggataagaggggtacaggggatatttggacgcttacagtagatgaatatgtagcagcaccatttagactccgtttagcatatcgtttatatcgcaatccattcgttatgtttgggttaggcccgatttatgttttcttgcttaaaaatagatttaaccgaaaaggtgctagaaaaaaagaacgtatgaacacttatttaacgaatattttaatcgttgctattgtaggaatgctttgctgggcaattggatggcaatcgtttcttttagtacatggttctatatttttaatagcaggttcaatagggatttggctgttttacgtacagcacacattcgaggattcttattttgaagaagataaagaatgggaatatgtgaaagcggcagtggaaggaagttctttttataaacttccaaaaattttgcaatttctaacgggtaatattggatttcatcatgttcaccatttaagtccaagagtacctaactataaactagaagaggcacacaacaatacccttcctttaaaaaatgtaccaacaattacgcttgctacaagcttgcgttcactccgtttccgtctttgggatgagaaaagtaacaattttgttagctttaaagatgtcaaaaatataattaaaaataatgtttctgttcgggtgaaatctgaactataattgcatcgtatataaaattccccttaatcattttcgatttaaggggagtttttgtttaaagattagatgccagataagaagaaaaattaaatgtttcaaattgtaatggaagcagattaggaattgctagtacgtaagtacaaatacaagataacaataaatgcattatgttaacaagtggagttatcatgaattttccattacgataactgttcataaatccgacgaaaattaatagcaaaagggggatcgtacaacagtatatctaaaaaattagaaaagacttgaacggaaatttcattcatttttcttggtgttccgcattccatacacttaaataggatgcatattctaattcatctggattgtcatgtaacatagaaatgaattctaatttatttctatcacaatctagaaagtatacacttgcagcgggcatccacctttggacaattggctcttgatttccttttccttgacttcctatcacttctattccacgctcctctaaccacgctttagaagtcattaaaaactctaaatttacaccaaaagcaaaatgtctcagctcaaagtcttcgatattatttacttcccatagtccaagcatttgttttttattttctccgacccaaaagaaagccactcttcttttggagagttttcttgctaaggttaatcctagcttgttttgatagaaatttatcgctttttctaaatttcttacatgtaaatgagtttcgtatatgttctgtatcattatgatcattcctttctttcttgataactaccagttgagtaatgaatgtagttctaataatgtacagctatatctgatatacctatttattattatatcgaaattgaaatacgataaatccaactgaggtagcaagttcaaatgaaaattttactacttttgtaggagaagagaaaaatccattaaattcaggtgaactcatatttaaataataaaaaaagacaacacatgaagtgaaacgccacgtgttgtcttttttgtatcgtacaatattacgaagtttcgctaattttagtttcactttgagtgttagttgcaattcttttcttaactttaaagtgatagtaagtatagcaaaagatgataaatggtacagtacaataaatgcctagtctttgatctgggataaagataagacttactaatataatgccatacaatccaaaaccaagaattggtacaaggggatagagtggagttctgaacttcaagtcgtctaatttcccaccttcagctaaatagtgtttgcggaaaaagaattgagaaacacaaattgacatccaaacaataattgttatgactccagaaatggaaattaaccataagtaaaccgtttcagcagctacgacgcttgttaaaagagaaaaagcagaaatagctattgtcatgattaaagcgttgagaggaatcccacgtgatgataatttctttaaaaatgctggagccatttcgttttttgataaagaccaaagcattcgagtagcagcgtatagtcctgagtttgcaacagaaagaacagcagtaagaataacaaagttcataatatcagctgcatatggaataccgatattatcaaaaacagcaacgaatgggctctttgtgagtcctgcttcttcccaaggaattaaagcaacaagaacaaagattgctaagacgaagaaaaacattgtgcgccatataatatttctaatagaacgaggtaaagtttttgctggatcttcactttcacctgctgcgattccgacaagctctgtaccttggaaggaataattgactgtaaccattgttaatagaatagctgcaagtccattcggaaataaaccaccatgatttacgaaatttgaaaggagtggagctggttcgtcgccttttaaatcaataaagccgaacatagcggcgccaccaagaattataaaagctataatggcagatacttttatacttgaaaaccaaaattctgtttctgcataactacgagcagataatgcgttaatagtaaagattgtaacgccaaatattaaacaccaagcccaaacaggaatatcaggaaaccagcgctgcattgtaataccggcagttgtaaattcaagaccggtcgtattcgcccagcttaaccaatacaaccatccgattgtaaagccagttgcaggattgatgaatttagtggcatattcctggaaagaacccgaaacaggcatggctacagcgagttcaccaagacatagcataacgaaatacattaataatccaccggccataaaggcaagtacggatccaccaggtccagcttgacttattataaagccagatccgttaaataaccccgttccaatcacaccaccgagtgcaatcatgaataagtgtctacttttcatcgtacgttttaattcattgtttgtattgtttacttgcgccattgttttcctcactttcgtagttgatagaataaagtttgatgtttttccgtattatggaatgtattccgtgatgtgaaatcttgttataattttcagataattaaaaagaaaagtcaatatttttttgtttgcgttttcaattcgttgttagtgatatatttttattgttagaaaattgaataaatatattgatttcatttcgaatgtttgctaaattgatagttaattaaacgtactaacatactacgagtaaagttgaggcgagttatggtacagtccattgatcgagcgataagtattattaaattattgaattctacaaatgaaaaagagtattgggctatttctgatatagctgatggaacacatctcccagttagtacagtacatagattacttaactctctaatggagcatgggttagttacacaaataccagagacaaaacagtacaaaattggaccaatgtggatggaaatagggttacgtcaattggagaaggtagactacagatcagttgcaagagaagtgatgaagcggttggcctttgaagtcgaagaaagtgtctatttaaatattccaaacggaacacattctattatcattgaaagaattgatagtcctttaaaaattcgagttatcgataatctaggggaacaaattccactttcaattggtgccgcaaataaaacgatgcttgccaatatgaaaacgaatgaaatggaacatattgtagaacatttactttcttcattaccagaacaaaagcaaattcttcttaatcaaataaagcaaataaaaaatgaaggatatgctgtcagttatggtgaaaaaacagaagggacagcttcagtagctgcacctattatcggatttaatcataaagtagtaggagcattaagtgttgggttaattagtcatcgtattaatgatgatcgactatcttttcttattagcaaggtaaaacaagcagctcatgaaatatcaataaaaatcggcagtacatcagaactataattttgatagctgtcgtcattttttattcatatactggaattcgttttcataatgcggaaaaatagggggatttatatgtcaaggtggcaatcaaaagaacaattgattcaattattaagcagtcttgttgaaattcctagtattacaggtacagaggctgaagtgatattgccagactttgttgtggagcaattatctgatttacagtacttcaaagaaaacccgcaccatgtgcaaaaaaatccgacgggggacggacgatattttgttacagcactagtaaagaaaagtgatagtacaaaaaatactgtaattctagtaagtcactttgatgttgtagatgtacaagattacggagtgtggaaagaagatgcatttaatcctaaaaagttaacatctatgttttattctcataaagatgaacttccagaccatgtacgtgaagatatagaacatggagattggctgtttggtagaggaacaatggacatgaaatgcggcctcgcattacaaatggcaatgattgaacaagcatgtgaaggaagattcgatgggaatgttcttttattggctgtaccagatgaagaagtgaattctgtagggatgagggccgctgttccgagactattagatttagcaagagagcataatttagattataaaacggtcttaaactcagagcctatgttttcaagacatcctggtgaccaaaataagtatatttacactggctctattggtaaagtgttacctggttttctttgctacggaaaagagacacatgtaggtgaaccttttgcagggttaaatgggagttatatggcttcattaataacagcagaactagagttaaacacagacctttgtgatattgtagaaggggaagcgagtcctccaccaactaacttacttcaaagggacttaaaagaggattattctgtacaaattccgcatcgtgcagtcacattatttaatttgtttttattagaaaaatcaatgacagatgtagtttcattgttacgtcaaaaagtaacgaaagtagcagagaaaatagaagagtcgtatgaaaaacatgcatatcgtttttctaaatataatccatttataccacctaatctcaaagtaaatgtattaacttatgaagagcttatcacatatgcaattgagcaacatggacgagaaaaaatagatcatattcaatctaatattataaaaaatagaggagataaagatgatcgtgcggtaacgattgatttagtagataaattagcgattttatgtaaagaaaaggcaccgatgattgtacttttcttcgctccgccgtactatccagctgtgagttcacgcaacaatcctttaataaaagaggtagttgtagaaatggaaaagtatgcacattacaatcataaaattacatttgaaaaccaaaattattttggggggatttcagatttaagctatgtaggcttgcagtatccactggattcaatgagttcgcttgtagacaatatgccattatgggataaaggctattcaattccgcttcaggaattagaagagtttgatgttccagtattaaatatgggaccggtaggaaaagatgcacatcaatggacagaacgtctagatgtaaactacgcatttgaaacactattagatatgttaccgaaatgcattgaaaaattattagtttctaataaaattacacaatcatagtagggaataggtaagggataaaacagaacctttaaagaagagtcgaatcaaattattttaatataattaaaaagtagaacggccaagctcaattttatatgagtttggccgtttatcatgtagtgaatttttaattaaaattatgtgaattcatagctaacgtaatctcttttatagttttattttttagtttgaccagatagttcaacagacttttgcgtacaacgctgcatagctgaaataatcgctgttcgtaatcctttttcctctaatgttgctacagcttctattgtcgttccgccaggagaacaaaccatatctttcaattcacctggatgtattcctgtttctagtaccatttttgcagagcctaacacagcttgagcagcgaatttatatgcttgatttcttggcataccatctagtacagcagcatctgccatcgcttctataatcatatatacataagctggtgaagaaccacttacggatgtgacaacatccattaatttttcacttacgatctctgtttgaccaaaactattgaaaatgtttagtacatcttctaaatctttttctgtcaccatttcattagggcataatgcagacattccttctccaacaagagcaggagtattaggcattactcttacaacctttacttttttattaaaggcattttcagtactttcaatactttttccagcagcgatcgtaacgatgatagcatcgtttttgattacttcttttatttcattaattattgatgaatataggtctggtttgattgataaaattaaaatatcagcatttttagctactttattgttgtcggtagttgtagttagcccatatttttcactagcattttttaaattagcagtgtttaaatctgaacaaataatttgatttgaagatactatatttttgtttatcattccgccaatcatagccattcccatatttccgcaaccgatgaatccaatttgtttatccataataactcaatcttgctccttttataatcaattatatcggtttgatattattttcttagaataagaataacatccctgtgcaatataaagaaacattctaagagaatatattcctttttgcaacactaaaagacaaaaattaattatattcgacattatgtaaatatatacactataatgtaaggttttatgtttatgaatatgagttaaacttatatcattttgtattttcattcagtagggcgataatttcatacaaataacttgtggctctatttatttttaaaaatacctcttgacaccgaatcaaactatatcgcataatataaaaaaattagattgaaaatcgttgaagggaattagtacatatgtcttcttgcgaaagagagtggaattcaccggctgaaagattcctcgtatagaatatatcgaacctatccctgagtcttaaatgaaagtttaggcgttcgcctgcgttataggcaccaagtggatatctatgtatatcaattaaggtggtaccgcggaacaatgaccgtttcgtcctttttattttattaagggcgaagcggtcatttttattttgctcttaaatacttcagtgcagcattgatgagaatagatatagttacaaagtgaatgaagtgtaatttataaaaaaactttgattttagacttgggggataaaaaagtgaaaaaacaacgaattgttgtaaagattgggagtagttccttggcagatagtcatggaggcatctctacagaacagctttcagatcacgttgccgcattggctcggttgaaagaagatgggcacgaggttgtgttaattacatctggagccgtcgctgcaggtttttcagcgctaggatatcctagcagacctgtaacgattaaagggaaacaggctgcagcagctgtcggacaaagtttgttaatgcaggcgtacacggaggaattccgtaaatatggcatcgttactgcgcaacttttgctgacgagaagtgatttttctagaaaagaacaatatagtaatgcttacgctacgttaggagaattattaaaccgttccgctcttccaattattaatgaaaatgattccatctctttagaggagctaacgttcggtgataatgatatgctgtcagctttagtaagcgggcttgtttcggcggatatgcttatgatctttacggatgtgaacgggttatatgacaaaaatcctcagaaaaatgcggatgcaaaaaaatattattttcttcctgaagttacggaagaaatttcttctcttgcaggagatgcaggctcaaaacttgggactggcggtatgaaatcaaaaatcgatgctgcaaagacagcactctctcttggtgtgagtgtatttatcggaacaggacgtggacaggaaaagtttgtagatgttttgaagggtaagggtgatggaacgtatgttggtaatgctcctcaaaaagaaatgaagatgaacaagcaatggattgccttgcattcgcttgttagcggacaaattgaagtagatgctggggcagctactgccatcattcagcatgggaagagtttacttccagctggtgttacgaatgtatcaggatttttccaagtgggtgaagttgtagaggttgtaacgcaacaagggcgcgtaataggaaaaggacaatgcacatatagtgcagaggaactaagagatgtaaaaggtatgcaaagccaagatattcaagtaagaggcgagagacatagttatgaagtcatccatagggatcattgggtttcactttaaaaaggaggaaataaaaatgaatgaagtgttagcaaaggggataaaagcaaaagaggttgctagagaacttgtgcttaaaactacagatcaaaaaaatgaagcacttgctgcaattgctaatcagctgatagtagaaacagcttatattttagaagaaaacaaacgggatattgaagaaggtaaggagaaaggattttctcattcactccttgatcgccttttgctgaatgaacaacgaattgttgatatgacagagggtattaagcagttaattgaattacgtgatcctattggagaatgtgtaagtgcatgggaacgaccaaatggactatctattcaggagatgcgcgtaccacttggtgttgtcggaatgatttatgaggcaagaccgaatgtaactgttgatgctgctacaatttgtttaaaaacaggaaacgcagtaatactacgtggtagttcttctgctatacattctaacaaagctatcgttagcgttattcaccgggcgcttaagcaaactagcttgccttcagaaagtgtacagctcatagaagatacaacgagagatagtgcaaaacagttgtttacattgaacgagtacttggatgttcttataccaagaggcggtaaacaattaattgatacagtagtgagagaagcgtctgttccagtacttgaaacaggtgcgggaaattgtcatatattcattgatgaaacagcagataaacaaatggcgtttaatattattataaacgcaaaaacgcagcgtccatctgtatgtaatgcaattgagacgattgtacttcatgagaattgggcagagcaatatggtagcgagttgttttcttccttgaaggaaagaggagtggagctacgtggtgataataaagcagtggcgattgatccttctatcttacttgcgacagaagaagactgggaaactgagtttttatctctcacactagcagtgaaagtggtttccactgttgaagaagcgattcatcatataaatacgtatggatctatgcattctgaagcgattattactgaaaacgaggaaaacgtcagcaagttttttacttctgtagatgccgcggcactttatcataatgcatcgactcgttttacagatggatccgaatttggattcggagcggaaattggtatcagtacacaaaagttacacgtaagaggaccaatggggcttccagcattaacttctacaaaatatgtgattcgtggaaatgggcaaattcgaaaataataataaaagacactcaatttaatctgtaccctttgtaaaggacattttgaaaaaagttaggcaacatcaagaaggaataacgttttttgacacttgggggtagtgcaaattcttaagttgatgggcatgtggccatgcccacataagggcacagtttactctttcccatctaataaacgaccaaggccacctaatacactaccttcgccagtactttgcgctgctgggcttgtaaggcgtgctgctaatcggctaagtgttaaggactgaatccaaactgttccaggtccttctaacgttgcgaagaataaaccttcgccgccaaatagagctgtttttacttttccaacgaactcgacatcatagttaatgtcttttgtcatagcaacgagacaacctgtatcaatgcgaagtttctcaccaggttttaattcacgtttatatacagttccacctgcgtgcatgaaagcaagaccgtcaccttcaagtttctgcatgatgaaaccttcaccgccgaagaaaccagttccgatttttttcgtaaactcgattccgatagaaacgccttttgcagcacaaagaaatgcatctttttgacaaactacttttccttgatattctgttaaatctacaggaataattttacccggataaggagcagcaaaggatacgtgacgcttaccgtgacctgtatttgtaaatacagtcataaacatgctttcgcctgtaacgagacgcttaccagcgcccattaattttccgaataaacctccagatgggccagaaccatcaccgaagattgtttccatttcgatgtaatcttccatcatcatcattgcgccagcttctgcgataacgctttcttctggatctaactcaatttcaacaaactgcatatcatcgccgtataatttatactcgatttcatgtgcttgcatttttttcacctcgtatgtaatagatacttatattgtacagaatttaataggattagaatactttagttttgttaattttcaaataaagtggaacaaaccaaaactgattatcagctcccgccaatcaagctgtccgcaaataccgggctaaaatatgaatatggaaattcaacattatattaaaattataaaaaaatggtggaatgaaagtgttctcatttgacgttttggatatagcgtgatatagtgaaatcactattgagctacataatgtggtacggaaataaagcacgttgaattaaaggctgtaagcttgttatacattcatgtcctttatatccaccttttcatgtggattcatagtttcatttttatttaggaggtacatgacatgcaaacaggtaaagttaaatggttcaacagcgaaaaaggtttcggtttcatcgaagttgaaggtggagacgatgtattcgttcacttctcagctatccaaggtgacggattcaaaactttagaagaaggtcaagaagtttctttcgaaatcgttgaaggtaaccgtggaccacaagctgctaacgttacaaaaaactaattagctagcgataaaaagcattccgattttcggaatgctttttttttattctttggaactcgactcatttgaagataattcgcccttaaaggtacgctcttcaaagtcatcaagcatttgctcatattcttcatgttcttccgtagcgaaaacttgcggattttttccatacatatctgtaccaataaagttttcgaaatcctctacgtagcctacgttttcttcactatttacgtacatgccattatagtttttcgaatcttgtctttctaaatcagatggtgtttcagatgttccgtaattagcaacatcttgccatgcatcttctgcatcatattcaacagaacgatcttcatcatgtttgtggaaagaaggagataacacttcttcttcgactggtcgtgtattcatatttagcttatttgtcgcgtgctggatgcatgttgtagcagtcggcattgcttctaatctttcaaatggaatttcttcgccagacacttcgcaaatgccgtacgtacccgcttctattttttgcaaggcatgtttcgtatccgctagctgtttatgccaaagttcaataagcccgaagtctttttcacgttcatatagctctgttgccatatcagctggatggttatcatagctagataattctccaacagactcacgttcagatgcacgatcttcattttcgtgtgtttgtatcgtttgctctagttcgtgtttttgtttttctaaaacggatttaaattgatttatttgttgtggagttaacatagtcgtccaccttcctacaattcagtttctttacatagtatgagcgttgcgagtaggaattatgagatgaatttcagatatgaaaaaggagccgcataagcagctccttttatagaaagtatccaagtaataatccgattcccatgaggagaccgaagatcgtatttgtttttgctgttgcaatcatcgcaggtaccatttccattggaatgcttttgccgataaagcctttcgtcgctttaaatgctttcggtgcacttaaaaatacgataagcatccatggtgatacgatgcccacgataattaaagcaattgtccaaatgtaggaaacgatgaacatagaagcaagtacaccaaccgctctttcacgtccaacgagaattgctaacgttttacgaccgttttctttatcgccatctaagtcacgaatattattagctagtaaaatggcaccaattaaaatggagcttggaatagatagtaaaatgacttctgatgttacagttccagtttgaataaagaatgaaattccaataatgataacacccataaataatccggctgttaactctccaaatggtgtataggcaatgggaagtgggccacccgtgtaaaggtaagcaacggccatacaaacaagaccgattgcagcaagccaccagctagaattcatacaaatataaacacctaatagtattgcgatgccgaaaaatccaaatgctaagttaagcactgtttttggctgaatgccatcgcgaacgatagcgccgccgataccaactgaaccttcgtgatcgagtcctcttttataatcaaagtattcattaaacatgtttgttgctgcctgaatgagaagacaagcaagaagcattataaggaaaagagggagatggatttgatttatacctccgacctgcattgcataggctgttccgatgaaaacaggaacgaaagctgctgttaatgtatggggacgtagtaaactccaccaaatgcgccagcctgtttgcttgcttggttttggcgccgtaggagaggaattcgtttcgacgttcatttccatgttgaatcctcctttggtcacatattgtacacaactaagtgtagaaaaagcatcatttagtgtcaacgtttattttctaggaagagaaggtgaatttctcagaaatgctaaacgttgacaggcctttcgtttgaggtgtatcttaaaatcaagcgtaattatgactatttttcgcccataggggggagacaattgtgattcaaacgaaacaaaaaggcttgcaagaagttcttagtgcagccattaagcatgcaactgatgaaaaaatattggttagttttgtaaaacaaatagactggatggatccgcttctgttttatgcagcaggaaaaaggattgcattggaaaatagatgttattttgcagatccagctcagcatgtaatatttgctggaattggctctgttttcactatagcaaattcttctcacaaacgctttcaagcggctcgtgacgagtgggataaagtaaaagagaaagcatttgtacaaagagaaaaatatgaatttggaacaggtcctcttttatttggtggattttcatttgaccaagaaaaagagaaaacggacttatggaaagaattcgatgatacgacattttcactaccagcatttttattaactgtaaaaaatgaaaaagcatggttaacgatgaatacattcgtttcagcaacagattgtgcagaaactctttataacgaaattgtttctttagaagagaaaatttttggggagagtaaatgtgcattagaaggattgaaattaacagttacttctaaagtggaagtggatccgaaaggctggatgaaagccattaagaaagtgcaagatgagatgaagcagggtaacgtgcagaaggttgtattagcgagggagctaaaagtagaaatggatcatcatattgattctgctcttgttttagaagcacttcgcattgggcaaccggattgttacgtattttcttttgattataaaggagcatgcttcttaggagcgacgccagagaggttaattcgtaaagaagatgagaagtttacttcgatgtgtcttgctggttcaactggtcatggtcaatctatagaagaaagtaagcgaaatagtaatgcgcttcttcatgatgaaaagaatttagctgaacacggttatgttgtgaacatgatcaggtcggtattaaatgagcactgcgaatacgttaatattccggagagtccaggtctattaacaacgaaaaacttaattcatttatatacgcctgtagaggcaaaaggcactgcgagtcttttaacgatggtagaagaattacatccaacaccagctcttggcgggacacctcgtttggaagcgatgaaactgattcgtgatgttgaattgttagacagaggattatatggtgcaccgattggctggatagatgatgaaggaaatggtgaatttgcggttgcacttcgctgcggattattaaatggcgagaaagcatccttatttgccggttgcgggattgtaattgattcagtaccgcaacttgaatatgaagagacaagtttgaagtttagaccgatgcttggtgctttggaggaattaatgaaatgaacaatcatatagaagcattatcatattatttaggcgcgttcgtggatgaactgacgcgtctaaatgtatgtgatgttgtcattagtccaggctcacggtcaacgccgattgctctactaatggaacaacacgaaggaatgaacacatatttacatgtagatgaaagatctgcaggattttttgcgctcggtatcgcaaaagcgaaaaaacgtccggttgcattattatgtacgtcaggaacggcagcagcgaactactatccagctgtatgtgaagctttccattcacgagtgccgcttatcgtcttaacagcagatagaccgcatgaattaagagatgtcggtgcaccacaagcgatgaatcaatttaatttatacggtacgtttgtgaagcaatttacagagatggcacttccagaagcgagtgaagcgatgtaccactacgctcgcatgacaacgcagcgcatgatagcaagtgcttgtttagcgccgcaaggacctgttcatcttaattttccagttcgtgaaccgcttatcccggacttttcattagaaagtttatgggataaaggacgcggggaatatacagaagtagttcagcaagggaacgtggtgatgccgagtgaatatgtagattctcttgtagggcgcctttcacatatggaaaaggggcttattatttgtggagatgatagtcattcagaaatcgcaacgtttgcaacgcaactagctgaaaaaacgggatacccaatattagcagacccactttctaatattcgtagcggacaccacgataaaacgatggtaatcgactgttatgatacatttttacgaaatgaattgttaaaagagacgtggaagccggacgttttaattcgttttggtggtatgcctgtttcgaaagcattaacgcagttcattaaaaaacaaacgaaagctgttcatatcgttgttgacgaatctggacaatggagagatccagctcttgttgcgacagaagttgtacaggcaagtgatattgcattttgcagtacattaatagaaaaaatgccagttatgaaaaagaatgattggtcccaaatgtggcaacatataaacgaaaaaacgaaggaaacgcttcgtgaaatggaaacatatgaaactgcatttgaaggaaaagtcattacagatattgtacgcgtattaccagaaggagcaacgttatttgcgagtaatagtatgccaattcgtgatacagattcattcttcttcacatcagataaaaatattcaagtgatggcaaaccgcggtgtaaatgggattgatggcatcatttcgacagctttaggagcgagcatgatttgcgatccgctcgtattagtcatcggtgacttatcattctatcacgatttaaatggactattagctgcaaaattacatgaattaaatataacgattgtcgttgtaaataatgatggtgggggtattttctcattcttaccacaatatgagaaaaaggaacacttcgaatcgttatttggaacgccgattgggcttgactatgagcatgttgttaaaatgtacggtggttcatttagccgtgtaaatggttgggagcaattccgggaggaagtacaaaagggagcaacgacagaaggtttacacgttgtagaaatttgtacgaaccgtgatgaaaacttaacgttgcaccgtacgttatgggcaaaaacacaggacgtaattactacatcattgcaaggtgaatcaaaatgaaagtaacgctgcaaggtgtatcgtatgaatatgaagtagtcggaagcggggaaccacttctacttcttcatggttttacgggaagcatggaaacgtggcgttcttttatctcttcatggagtgggcagtttcaagttattgtagtggatcttgttggacacggaaagaccgagagtcctgaagatgttgcgcattatgacattcgaaatgtggcattgcaaatgaaagaactattagattaccttcatattgaaaaagcacatatacttggctattcaatgggcggtagactggcgattacgatggcgtgtctatatccagaatatgtacgttctcttttattagaaaattgtacagctggactcaaaagtgaagatgagcgaaaagaacgctgtgaaaaagatgagcgacttgccgataaaattgagcgagaaggcatagaaagttttgtatcgatgtgggaaaatattccgctgtttgaaacgcaaaaacgtttagcaaaaaacgtacaagaagcggtgcgaaaagaacgacttgctaacaatccaaaaggacttgcaaatagcttgcgcggcatgggaacaggggctcagccttcatggtgggatgagctacacaacttgaaaatgcctgttcttttaatgaacggagagcatgatgaaaagttctttcgcatattaaaaaacatcgaaaaatgcgtctctgacgcgaaatttgtcaaaattgatggtgctggccatgcaattcatgtggaacaaccggaaaagtttgatacaatagtaaagggatttctaaaaactatgcagtgatgcttttttcagttaagaatgaagttacacttatagatgagatcagaaatatacaaggaggtagttgtaatggctattgaatgggtaaaagaaggcaattacgaagatattatttattcaacatacaatggtatcgcaaaaatttcgattaaccgtcctgaagtacataacgcattccgtccaaaaacggtaatggagttaatcgacgcttttgcacaagctcgtgatgatgcaaatgttggcgttatcattttaacaggtgaaggtggacgtgcattctgttctggcggcgaccaaaaagttcgtggtcatggtggatatgtaggtgacgaccaaatcccacgtctaaacgtattagacttacaacgtctaattcgtgcaattcctaaaccagttatcgcaatggtagcaggttatgcaatcggtggaggacacgtacttcatatcgtatgtgacttaacaatcgctgcagacaacgctgtattcggacaaacaggtcctaaagtaggaagctttgacggtggatacggagctggttacttagctcgtatggtaggccacaagaaagctcgcgaaatttggtacctatgccgtcaatacagtgctggggaagcgcttgatatgggcttagtaaatacagtagtaccattagaacaacttgaagcagaaacagtacaatgggcacaagagatcttagcaaacagcccaatggcacttcgtttcctaaaagctgcattcaacgcagacacagacggtctagctggtattcaacaactagctggagatgcaacgttattgtactacacaactgacgaagcaaaagaaggtcgcgacgcattcaaagaaaaacgcagtccggacttcggtcaattccctcgtttcccttgatcaaatcaaaagcggagccgactgtttagccccgttgactaaggttcttagacggaagcggctcgcccacaaagtgagtcgcaaccaaatgatcaaaccggaaacaaaacaactaagagacttgatgtcacatcaagtctctttctttcatgaaaggagaatgtatgatggagacgatgccaaattggttaaagcaacgtgcatttttaacaccagatcgtactgcaattgaaatagaggaaaaggaagttacttttatgcagctgcatgaaaaggtagtatctgtttgtgaacacctcacgcatgtaggagtgaagcgaggggaaaaggtggctgttctgatgaaaaatggtatggagatgattacagttattcacgccctatcgtacgtaggagcagtagctgtgcttttaaatacgcgtctttcaagagaagagctactttggcaaatggatgatgctgaagttatttgtttagtgaccgatcaagaatttgatgctaaagatgttcctgtctattcattcgccgaagtgatgaatggaccaaaagaggaagcctctatacaagaagaattctctttagaagaagcgatgacgattatttatacgtcagggacgacagggaaaccgaaaggcgttattttaacatatggaaatcactgggccagcgcggttggctcttcgcttaatttaggacttcgtgatgatgattgctggttagcgtgtatgccgatgttccatgttggcgggttatctcttctaatgaaaaatattatgtacggcatgcgcattttactcgttccgaaatatgatgctgattttattcatacagcacttcaaacgagaggcgtaacgattatttcagtcgtatcaaaaatgttaactgatttattagagagacttggagaagaaacatatccttcttctttacgatgtatgttacttggcggaggaccagcgccaaaaccgttactcgaaacatgtgtagataaaggaattcctgtgtatcaaacgtacggtatgacagaaacgtcttcgcaaatttgtacgttgtccgcagattacatgttaacgaaagtaggatcagctggaaagccactatttcagtgccaacttcgtattgaaaaagacggcgtagtagtgccgccacatgcggaaggcgaaattgtagtaaaagggccgaacgtaacaggcggttattttaaccgtgaagatgcgacgcgtgagacaattcaaaacggatggcttcatactggcgacctcggttatttagatgaagaaggatttttatacgtattagatcgccgcagtgatttaattatttctggcggagagaatatatatccggctcaaattgaagaagtgttgctgtcccatccagcgatagcggaagctggtgttgtaggtatgactgatgataaatggggacaagtacccgctgcttttgttgtgaaaagcggggcggtaacagaagaagaaattcttcacttttgcgaggagaaattagcgaaatataaagtgccgaagaaagcatgtttcttagaggaattaccacgtaacgcttcgaaaaaattgttaagacgagagttaagagaattagtggaggagaaagaaacagtaaacaaaaacatagacaaaagtaggcatatataataaaaagtaattatgaaacaatataaaccaaaagaattttcagaaatgcttaatgtctctgttaagacattgcaaaggtgggacaatcaaggtgttttaactgcttaccgaaaccaaaaaggaagatgatactatacagaagaacagtataaggaatatatgggtattcaagaagaaaataaagtaggcaaagtagttatttacacaagagtatcaaatccaggtcagaaagatgatttagaaaatcaggttgagtttttaaaaacattcgcaaatgcacgagggatgattgtagatgaagttatcaaagatattggtagcggattaaactacaaaagaaaacagtggaataacctgattgacagttgtatggaaagaaatatttcgactatcatcattgcacacaaagatagatttgtacgttttggatatgagtggtttgaaaagtttcttcgtaaaatgggagtggaaattatgattgttaacaatgaaaaactatctcctcaagaagaacttgtgcaggatttaatatctatcattcatgtatttagcggtagaatatatgggttgagaaaatacaaaaagaaaatgtcggaggatgaagatttatgaaaagagcatatttaatagaaatcaaaccgacaactgaacaagttagtaaaatccgtcaaactattggggtgtgtcgatatgtatataacctgtatatctctaaaaataaagaggcatatgagtcggatgggaaatttcttagtggctatgacttttctaaatggttaaacaacattcatacaaaagagtgtgaccagtggattaaagaagtgtcgagcaaagcggtaaaacaagcgattatgaatggagataaagcttttaagcgattttttaaaggtttatctaagtttccacgatataaaaaaagaagaagcaagatgtgaagtgctactttccgaaaaacaacaaaacagattggacagtagaaagacatagagtaaaagtccctacaattggttggataaggttaaaagagtatggatatatttcaaaaaatacaactgtaaaaagtggtacagtatatcaaagagcaggaagatactatgtgtctatactctgtgaagtgaaagaggtaaaaccaaattcaattctcaatgcagtaggtataggaattgatttgggaattaaagacttcgctgtacgtagcgatggaaaaactcacaaaaatataaataaaacagtacaagtaaaaaagatagaaaaacggttaaaacgtgaacaacgctctttatcacgcaaatttgaaaatataagaaagagaggtgaacaacctgttactaataaaagagcgaatataaacaaaaatattcttagggtgcaacagctacatgctaggctagcaaatattcgattagcgtatgtaaagtctattgtaaatgatgtggtgaaaaccaagccaatgtttattacagtagaagatttgaatgtgaaaggtatgatgaagaacaaacatctatctaaagctgtagcgcaaccatgtttttatgcttttaaaacatggttatcaacgaaatgtagggaatatggaattgaactacggcaagtggacagattctatccatcttctaaaatatgttcatgttgcggtcaaaaaaagtcggatttaaagctgtctgaccgagtatatacatgtgattgtggaaatgtaatggatagagatttaaatgcatctatcaaccttttacaagcaaaaaaatatacaatactaacgtaaatagattgtatatatgtacggtgggctacatcggaatttacgcctgtggagtgtcacagcaaactgtagtagcaagtgattagcgaggcagggcacgtagaagcaggaatactctaagaatatacatttgtctatatttttagtagcagatgtaggtggaaataaaaaaagcgacacttcatataacagaaatgccactcgtaatcccgtttgctgcaagctacgggacttacgaaaagcgtgagagtatcgttattgaattagaagatgaagatgggtacattggatttggcgaagtcgttgcgttctctgaaccgtggtatacggaagaaacggtgaagacggcgctgcatgtactgcaagactttttaatacctgatttattaaaggctgaaatttctcatccgaatgaggtaccgggtctatttcaacatataaaaagaaaccgaatggcaaaggccggaattgaaggggctgtttgggatttatatgcgaagtgtcaaaagaaatcgttagcgacagtgcttggcggaacgaagtctgaaattgaagtcggcgttgtaattgggatcaatacgattccggttatgttaaaacaaatcgagaagtacgcagaagaaggatacgagcgttttaaagtgaaaataaagccagagcatgattacgaattattgaaagagattcgaaaagagtttccgcatatcccgctaatggcagatgcaaattcagcatatacattaggggatacggagaggctgaaacgactagatgaattccaattaatgatgattgaacaaccgttagccgattatgattttcttgatcacgcggagttgcaaaagaaaattgaaacgccgatttgtttagatgaaagtattcatagtttagaagatgcacgcgttgcgattacccttggtagctgccaaattgtgaacgttaaaccagggcgagtgggcggattaacagaatcggttcaaatccataattattgcatggagcacaacatacccgtttggtgcggcggtatggtggagatggggatttcaagagcacaaaatgttgcgcttgcctcattgccgaactttacgattccaggcgatatatctgcttctagcagacattgggagcaggatattatttcgccggaagtgacgcttaagggcggaaaagttatggtgccgcaaagtgttgaagctgagtatgaagtagaccgcggaaggttggcggagatcacgaaacagcgaattgttttggagcggtaacttgagtctttaaagtagcgggcgaatttcgttgttaattgtcggtaagtcgatatatttcaataatcgctgatataatgcgagttacggtcgatataattgagaaatcgccgatataattcaagttatggtcgatatatttggaaaatcgctgatataattttatttacaaaggttactctaacgggtaaccttttcgtattgtacaaattggatagactagtttacaatcgagcgtataaaagggggagtaaaatgaagcgcatttcaattttaatagtggatgatgaggcagaaattgctgatttaattgagatacatttagaaaaagaagggtaccacgtcgtgaaggcagcagacggggaagaggctgttcatattattgaaacgcagccaatcgacttagtggttttagatattatgatgccgaaaatggatgggtatgaagtgacgcgtcaaattcgcgcgaagcaccatatgccaatcattttcttaagtgcgaaaacgtctgattttgataaggtgacaggtcttgtattaggtgcagatgattatatgacgaaaccttttacaccgattgaattagttgcgcgtgtaaatgcacaattacgtaggtttcttacattaaatcagccgaaagtagcggggaataaatctgctttagaggtaggcggagttattattgatcctgagcaaagaacagtgaacgtctatggagagcaaattgagttaacgccgaaagagtttgatattttatatttattagcgagccatccgaagaaagtgtataatgtggaaaatatttttcagcaagtatgggcagatgattattatgaaggcggaaatacagttatggtacatattcgtacgttgcggaaaaagcttggggaagataaaagaaaagataagctaataaaaacagtgtggggagtagggtatactttcaatggctaatatgatgaaaagttttcgatttaaaatgattgccttatttgcgttaagtatggtgcttgcagcaactgtaacttatataatttataaaggattgcagctgtattataaaacgatggttcgctatgaagagcctttagcgcaatttaggtcagtggtaagggaagttggagacattaacttctttttaattttctttattccgttatctattatctttttcttctttttgacaaaaccgtatttaaagtattttagtgagatttctaacgggattcatcatcttgcgaacggtaactttacgaataaagttcaagtttcatcaaacgatgagtttggagatatcgcacgtgaaataaatgttgcgagtgaaaagttaaaagaagcggtggaaagaggagactttgctgaaagtagtaaagatcagctcgttgtaaacttagctcatgatttaagaactccattaacatccgtgttagggtatttagatttaattcttaaagatgagaatttaacaaaagaacaaattaaacatttctccacaattgcatatacgaaatcgcaaaggctcgaaagtttaattgatgagttatttgaaattacacgtatgaattatggcatgctaaagctagataaaaagccgattgatataagtgaactacttatacagttagatgaggaattgtatcctttattagagaaacatcatttacaagctaggttgaatattgatcctcatttgccaattaacggtgatggaaaattgttagctagagtatttgaaaacttgttaacaaatgccgttcgatacggatatgatgggcaatttgttgatctgaatgggtatatcgataatggagaagttgtcgtacaagttatgaattatggagacagcattccagaagaagatttaccgtatctttttgatatgttttatacaggtgataaatcgagaactgagaaccgtggcgggacaggccttggactgtttattgcgaaaaatattgttgagcagcataacggtacaatttctgctgaaagtaatgtagttagaacaatgtttgaagtgcgattgccaaaagacgagaacttaacaatttaataaaaatttaaactttaccccactttttattttaatagttttttctattctatacgtaagttacgttaaggaggaactagaaatgaaaaagtgggtatttatttctttttttatagcatgcacagtatgtgtaggcttttatatatcaccgttatttcaaaaggaaatcgatgttaaaattgtcggaaaagatgagctagtaaaggcggcaaataccgagaggaaagagattacgaaggaacaaatttataagggtgatttattattagttaatagggattatccagtaaaaaaagatagtattaggtctgatattataaatgtaaatcataatagtgaattagtaagaggctacgtaatatttgatagaaatcttcgtttatcaaagtatgttgtaaaaaagtttttgaacgttgtcgatgcggctggaaaagatggcgtacagcatttcttaatgagtagtgggtatcgagattttaaagaacaaagtaaattatataaagaaatgggatctgattacgcgcttccagcaggatatagtgaacataatttaggattatcactagacgttggatcaacgcaaaagaagatggagaaagcgcctgaaggaaaatggatcgaagagaacgtatggaagcatggctttgtattacgttatccgaaaaataaaagtaacattactggaattcaatatgagccatggcatatccgttatgttggcctacctcatagcgcaattatgcaaaaaaagaatttcacactagaggaatatttagagtttttaaaagaggaaaaagaggtttcaactgaagtagaaggtaagaaatatactgtttcttattataaagtttctgagaatacgaaagtgaacgttccagcaaacaagcagtatgaaatttccgggaacaatatggatggggttattgtgacggttcaggaatagagaaaaaaggctgtgccatttgggacagccttttcttatataagaaaggaattgaagtttttttgtcggtaaatcgatattccttgtcgaatcgttgatatattgtaagttatgatagatataattgaaaaatcgttgatataatttcctatactattaccattttggaggagcatctttttattcactttcaaacattataacgttatatttacttctccctttttttgtgttacgctaaacgtgtgaaagacatataaaatgaaactttaatgtaagcgtattcttatggcttcttatagaaaagggtggaagtacaatgacagaacgattcgtactacgtaatgtaaaacgtgtgaacggggaagagattgacattgtaattgaaaataataaaatcgcacaggtgacgaaagctggtgctggcgagggtggaaaggttcttgattactctggtacttacgtatcgagtggttggattgatttacatgttcatgcttttccggagtttgatccgtatggcgatgaggtggatgaaattggcgttaagcaaggggtaacgacaattgttgatgcgggtagctgcggtgctgatcgtattgcagatttagtaaaaagtagagagcaggtaaaaacgaatttatttgcctttttaaatatttctcgtatcggtttgaaacgaatcgatgaattatccaatatggaatggatagataaagagaaagtaatagaagcagtagaaaagtataaagatgtaatcgttgggttaaaggcgagaatgagtaaaagtgtcgtttgtgatagcggaattgaaccgcttcatgttgcacgctctttatctcgtgaaacatcattaccaattatggtacatatcggttcagcgcctcctcgcattgaggaagttgtacctcttttagaaaaagatgatgtcattacacattacttaaacgggaaagaaaataatttattcgatgaagaaggcaaaccgctacctgtattactagatgcagtgaatcgtggtgttcatttagatgttggtcacggtaatgctagtttttcttttaaagtagcagaggcggcgaagcatcacggtattgcttttaatacaattagtacagatatttaccggaagaatcgtatacacggtcccgtgtatagtatggctcacgttctttcgaaattcctttacttaggttatccgctagaagaagtaattgacgcggttacgaaaaatgcagcagagtggctgaaaaaaccagagcttggccgcattcaagaaggagatattgcaaacttaactttatttacagtgaaagatgagaaggttacgttaattgattcagaaggggatcagcacattgctgaaagaaggattgatacgaaaggggttgtaatcaatgggtcattcattgaatgctaagtacggattaaaaagagtaattaatgcgagcggtagaatgagtattttaggtgtatccgctcctacagatacagttatggatgcgatgaaacatggtggacaaaattatgtggaaattgctgatttagtagataaagcgggagaccatattgcgagaattctagattcagaggcagcggtcgttgtgaactcagcatcgagtggcattgcgctttctatcgctggtatcgtgacggaaggaaatcgccgtaaaagtgaaagacttcatcaagaagtaatcgcgaaaaacgaagtaattatgttaaaaggtcataacgttcaatacggtgctccagttgaaacgatgatttatttaggcggcggtaagcttgttgaagtgggttacgcaaatgaagggaaagcagagcatattgaagatgcaattggtgaaaatacagcagcgattctgtatgtgaaatcacatcatgcagtgcaaaaaaatatgatttctgttgaagaagcatgggaagtagcgcagcgaaataacgtaccacttatcgttgatgcggcagctgaagaagacattcaaaaatatgtgaagtattcagaccttgccatttatagtggttcaaaggcaattgaaggacctacttctggtattgttggcggtaaacgaaaatatatcgaatggctgaaagtgcaattacattgcatcggaagaagtatgaaagttgggaaagaaacaactttcgccttacttcaagcgcttgatgagtacggcgtaaaagaagataaaagtgagcaagaaaaagaattgctacaagtacttatgccgctaaaagaattaaaaggtgtaaatgtaacgatcgttcaagatgaagctggaagagcaatctttagagcacgtattcatattagcgaaaaagagttaaataaatcggcaaaagacgttgtgacagcattacgcgaaggggaaatcgcaatctatacacgtgattacggagtaagacaaggattctttgatattgatccacgtccacttcaaggtgatgacatacatgtaattgaagaaaaattgagagaaattgtagggggaaactaaaatgacaaatattcaaaaacgtttttataaaggccgcgtagcattaaatgtattagcgaacaatacccgaaatgcgaaagatatttttgaagcagcagaagggtatgtagtagtgggggtattatcaaaagactacccaacagtagaagaagccgttacagcaatgaaagcatacggaaaagaaattgatgacgctgtatcaatcggactaggagcaggagataatcgccaagcggcagttgtagctgaaattgcgaagcattatcctggcagccatattaaccaagtgttcccttcagttggagcgacacgtgcaaatcttggcgaaaaagatagctggattaatagtttagtatccccaacaggaaaagtgggttacgtaaatatttctactggtccaattagcgcagctggagaagaaaaagcaatcgttccaattaaaacagcaattgcacttgtacgtgatatgggcggaaattcattgaaatacttcccaatgaaaggtttagctcatgaggaagaatatcgcgcagttgcgaaggcttgtgcagaagaaggatttgcattagagccaacaggcggaattgataaagaaaacttcgaaacaattgtacgtattgcgcttgaagcaaacgtagagcaagttatcccgcacgtgtactcttctattattgataaagaaactggtaacacgaaagtagaagatgttcgtgaattattagcagtcgtgaagaagctagttgatcaatatgcgtaagaaaattgcagcgtttggcgaagtaatgatgcgcatgcaagtacctggatatgaattgttgtcgcaagctaacacgttaaattactcattttcaggtacaggtgtgaacgttgcagcggcactttctcacttagggcatgaagggcttcttatttcaactttaccggaaaattcggttggagaggcagctgtatcttacattcaaaagttagggattcaaacttctcttgtttcaagaggcggtaaatatgtaggtatgtattttttagaaaatggattcggtgcacgtgcaagccgcgttacgtattcgaatcgactagaaagtagcttcaatacggcgtctgaagagatgtaccaatttgaagaaattgctaaggaaattgatatcgttcatttttgcggtattacacttgcgatgaatgatacggtgcgccatcatatgaagtctttagcgagagcagttaaagaaaacggaggaaccgtcgtttttgattgtaattatcgtccatcactttggggagaagacggatatgaacaggcaaaaccgcattatgaagaaatgctgggacttgctgatatcgttatgatgaacgaaaaagatgcaatgttcgttcttggaatgaaaacagaagagacagagcgagaggcgcaacttgttgatcttattccaaaggttgctgaaacatatcatatcgctacaatcgctggtacacatcgctctattaatagtgataatacacactcgctacgcgggtttatatgtaaagatggtgcgttcacttttgcaaaaacacttgcgttttctgtatatgatagaataggtgctggagatgcttatacgagcgggattattcatggcgagatagaagagtttgcaccagagaaagctgtttcatttgcgtcagcagctggaatgcttgcacatacaatcgtcggtgatacgcccatgtcatcagagaaggatatacttcgggcaatgacggcatcagtaggtgatgtagaaaggtagtgggtgtaacggtgaacgtaacgaggaaaaaaggaccattatatttacaaataaaaaatattattcgtgatcgaatattgcatggtgtatatgcgattcatacgaatattccttctgaaccgcagttagaagaagagttcaaagtgagcaaaattacagtgcgtaatgcaattaaagaactcgctcaagaaggatatttagaaaagaaaagcggtaaaggaacgaaagttatccgtaatacttctgcgacaaagttgtcaaaaggtaagaaatttacagaagtgttagtggaagaaggatataaagtacaaaagaaattgctaaaagcagaaatcgttcataatgaagaaggaacggtgccatttcgattattcggcaaggagagttttcgtattgaacgtttatatacgttaaatgatgcaccttacattcattatacgcactatttctcagcaggaatggcaagtacagatttatcggactttgacttgcaatcgctttatgatttagttgaagaccgaggcattcacttagaaaacttcagagatgaattcgctgttggactcgcgcctagtttcgttgcagaagcgctaggtgaaaaagaggggacagcgttattaaaacgtatgcgctattcttatgatgaagttggcgaagtaattgaatatagcgaaggctactacaatacagaaatgcagtattatgtagtgaattatgacgtataaaaaagaggggatgttggtcatctccctgtcaagtagacagaaataaaaagagtattatgccacggccttttcccgatattctatcggggaaaggccggcctttccccgatagaatatcgggaaaaggccgtggcataatactctttttattactgtctacttgacagggagatgaccaacttccctctctttttttatttgcctcaagtttctaactttaaaatatattctaattaataattgtaaagaagtacaatcggcactacagcaataagaaaagcaattacactaatttgcatattttgttttctattcactctgttttttaaaaatagatatgcaaatgaattaataagtaaaattgctacatagatccctgcataaccaagtggagaagtaactatatcccataaaaatatcaatccagtaccaataaatatgctcaaaaaataaatagaaaataatagaattttttccaaaaaatatcttcctttcattatttatttcttgtataatcctattatagtaaaaattttctaaaaataggaggttattatgagaaaaaataaaatttgtttatctgtttgtgccactgcattaacattggtttcaacactctcaatttttagcgaaaacaaggtagcagctgatactattgaaaacacgacaattcaacaaacgcaagaatcaaatgatcttaatcaaattaaaataccaatcaacgatatcaacgatttagacctagaagcactaggatttactccttcacaaatcaatgactttaaaaattcaacttctcctaatagtctagcacccttagccgctgcaaaaactcaatatgtatattggaataaagcaaaattacaaggtgtcttatgtcgttctttatcatcattaccaaccggaaaaccccttggtgattggatactttctcaaggaatagcactacttggaccagcactatcaaagtcagtaggattatcacttgcatttattaatacagctttaaaaaagagagttagttttttacaaaacgctttaacacaagtccgatttggacaagctactggtattcgaattgcaattgaacctaatcctggtggataccctgctgcttacgtaacaatgagcatttattaatagtaataaaaaagaatgcagatatttaatctgcattctttttttaatgtgaaaataaatattattgctctttggaaacatacactctttcttctctcttgcttcatcatgtttcttctatttaatctttgaatatccacattagaattctcaccgctatatcaataagtcacatcatccgatcaaattcacaatttctcttttcttccaaacgaattttctctttttgttctttcacttttatttcgatgtagtttttttacgcttttctttcttcataaatctcagaccctctttctatatatttgaattgtctactattgatatatcgaattccacattacgagtaatatcaggtgccaaaaaaattatcagacacagtgtcgtttatttcactcatgtgtattatcatctttagataatttattaaatatataattatataaaaaaatagaatttttaacactataaacttaaacaaaaagtcaactacaactatcctgaaaggtacaccttttgaagtacattaaactctattaaatttaatacttcaaaaggttaaaaaccgtatttttgaagtattaaaaaattaaagataccttttgaagtatttttgttataattttagtagaaccaattttgaagggatgtctatttattttgaatacaagaaaatttggatatataagagtcagtagcaaagaccaaaatgaggatcgtcaacttgaagcgatgaaacgactcatcactgatgaacgagatatttttatcgataagcagagcggaagagactttaaccgtgaacaataccaacttctaaaacgcatgttaagaaaagatgatattttatatatccattccctggatcggttcggaagaaataaagaagctatccttgaggaatggaaagatattacccaaaatatacaggctcatattatcgtattagatatgccacttttagatacaactcaatataaagatagtttagggactcttattactgatttggtacttcaaatcttatcgtggcttgctgaagaggaacgaacaaaaataaaaactcgccaacgtgagggtattgacgctgcaaagaaaaaaggaaaacatttaggaagacccagaactgaaataactccagaatttattaatgcctataatatgtggaaacacggacagataacagcgctatatgctatggaaatgtgtaatatgagtagccctacattttatagagtggttaaaagatttgaagataggaggaataaaaatcaataacattacaagaaaaaaccaagatacaatacaaggattttcatcttatttattaaataaagggcgaaaaccctctacgattaagcgatatatctatgatgtagaaagctgtattcaatggctgcatcaatcaggaagattctcggactctgaagaaatgaattgggaatccctatataagaaggatttcgaagcattttttaattatttaatagaagaacgccaatactccgataaaacggtacatcgtatttacatcgttcttaataggctgtacgaatatttagatttacctagccccattgaaggtgttgttcacatagctccacctgatcgtgcattgcgtactgaagactttatcagcattcaagaagaggaacgcctaaaacaagtatccgcatcattagaggggctgacagaaaaacaacgaactagccgtcctatgattttagaacgaaatctttctattataatcttgctcctagactacggattatctctacatgagcttgtcgctttacgaatgaaacatgtacattttgagaacaatacactatctattcctgaagacacaaagattaatcgtacaatccagttaaaagaagtagataaattacacttatatcattactataaaactattcccgaaccagtacgcccaagatatcacagtgatgatccactctttgttgcttttcactttaggttggggacttatctttggagttatgacaatgacgcaccaaaatttctaacggacatgtcagttcaaaaaatgattcgtttagagataaaacgagcaaatttaaggaaagggatttctgcacaacattttcgaaatacctttattttaaagatgattcaacagcaatacacagctgaagatattgttaagcaagtcggctttaaaactgacgtatccttaaaaaggtactatacatactatgagaaaactaacgagaacaagggttaaaacactgcacttgctatataaattttatatagctacagatttttcaggtgagatggaggtgttaagatgaagaaaaataaggagtcatattttatacacaaatacaccttgcgagaccagactactaaatctattaaaatcgagtcgtggcgttcattaagggaagaaatgcaagtattaggcataacggatagcgacatttttcaaatgcaaatgattaaaataaagccaaattaaaagcgccataacgttatgttattgcgcttttaacttattcatatcactccaattttcaaattagacgtggaagaagaaccaatcattgttggttataacgtgagagtaattcgatattgtggacatgtatatatgttaacatgtgtacatttttaataaaggcttgtagccaaaaatacaaatgaattaaataatatatgcgctactattggtacttttatatctctggtcttttcgtaactccatgcatataaacaaccatttacaaagtaagggaagaagaaccaatcaaaatgcacggctgcaaagataccattagcgatgagaatcgctgttgtacgattgattcgttcaaacagtttttctattccaaacggtagaatctttctgaaaatccattcttcaattacaggagcaattaatagagggacaattaaatagaagatattcaattctacttttgcattcacctgttctgcattgcctgtgtcgattccaaaatagctttttatataggaaaaaaagagagtggacacgatagctagtccagtcgtcattaacacccattttcccttttctactaatctttttacattcaactttcttctccccttactatgattctcgtttattttttagcaaattcaaatgtgatctttccgctagaatcaagcttcaaatacgcatcaaattcttttcctgatttccctttcattcctttaattaatcctgttttcttacccgttaataattttttaacgtttgcttcgctaattttctttgttaaaaattcgctcggaagagagaacttacaaccttccttataacctgtacaaccgtaaaatgttttgcgattcgctatgcctttgccacatttcgggcatttccctacggaatcctttgttttcatttcttgtactttgctatctatctgaagctcaccaattgacttcgtagcgttgacgatcaattgcttggtaaattcccctgtcttcgctacaaacacctctttagagccttgtttcttcccgattttacgcaaatacccttcccattgcgctgtcatttcgggcttcgctaataacgtgccgcccacggcttcgcaaagaatttcacctttcggtgtaaccgtcactttattctttttcacttctatatattcttgctttttgagcgtttcaatgatgccagctcgtgttgcttccgtaccaagtccttctacttcttttaggatgcttttactttcttcatcttctactgaagcgccgcatgttttcattaaagtaataagttgtccctctgtataaggatttggtggtgttgtgatgccttcttttgtctgtatcttcccttgtacaagttcgcctttttgtacaactggaaggagggattccctgtcttcgctctcttcttcgcttggttgatctgttttataaagttctttccatcctaacgctttttccgattttccttttgtcgtaaactctaacccattcatatctgttgtaataattgtttcttcatattcgtaaggcgcatggaacatgcctaacacactctttaacacttccgtatacaagttgcgctgcttgtccgttaattgatctaccttttgtttcgaaggaacatttttagtcgctataacggcatagtgctcctgtactttttgattatcgacgtagcgtttattcggatctaatgattttggttggaaggatactcctataatagattgatatccctctaggtttcggactaaataagcaaattcattttctgtaatgaaattacagtctgttcgtggataggtcacaagttttgcttcgtatagctcttggacaattttcaacgtatcggcaggtgaatacttgtactttttattcgctaaagcctgtaaggaagaaagagagaacaactttggcgcttcttgtttcttcggttttacttcaacggattttactgcaccttgctgattcgctccttcagacagctgatgtttcttcagtagcaattccacttcatttttcgtttggaatcgctctttgtatcttcccttgtatgttccgttcatccctttaaactgtccttctagttcaaagaaaggggatggcttaaagtgtttgatgtcctgctgccgttggttaatgagacataaaacaggggtttgcacacgcccaacgctgtaaacaccttgtacgcctttttgacgtaataacagcgtatataatcggctcgcattcataccaattgcccaatcactaatttgacgagcctgtgcttcagcaaacatactctcaaactccgagccttccttcaagttctgaaatccttttttaatttcatccacttctaagctgttgatccaaaggcgtttcatttttttagaagaacagcccgcttcttgaatgattaaacgtgcgattgcttcaccctctctatcaatatccgttgcaattgtaatacaatctgcttccttcattaatttttttacaacgttgaactgctttcttttatcggctgatactttatatccgtagcgctccggtaaaattggcaattgtgacatatcccatttttcccactctgctttataatcttgtggtgctttcaattccactaaatgcccatatccccatgtaatattcgctccattcggcattaaggaacaaggcgcaatagaaaagtagccatccttcttctcaactttcgggaatgcttctgtatacgctttcgcttgtgatggtttctccgcaataattaatgtagtcatgtgtattacttcctctcattattaaaattttgtataaaaaaaggagtagcatgaattatgctactcctaaaaatgtgaacatgtgtaaatgtgtatttgtgtacatttatcataattgggttaataaatatatttttctatagcttcttctattgtttcagcagctttttcttctgagtaatctaaataggctggcattacttcaccgatatttaataccattaaatcaaaccttttcccaatgctttcgttataaaaacaatgagaataataaataggaatttcatacaacatccagccctttatattaaaacctgtctcgtggatataagtaatacagttgtgaaaacgaatcattgagtcatcttcaaaattctgtttattgcaataaactccactttcaagcccttcaaaacgaaaaatatattcttctatttttatctttatataaacattcaaactattttccagtaattcttttgcaatttctaacttctccattcaaatctcctccttttaaattttgtatacaaaaaagagagcaacatatcgctacgttgctcttactgtttttattgattcttcgctttatattactactcactcttcatttaccttcaatcaaaatatcaattgctctccaataactttttacaacggctaccgcttcatcttctgaagaacaaactacaattgcagctaagtatttttttccattgtatacacatatttcagcttcagaatatctactaatttcgtcatcttctaattctcgatgaattaaaaaacgattatcatactctttttcaattaaatagctagttgaatttaaaaaattattttctacccgatttggatagttcatttcctttatttctcttgcaaaaaagtagctctctgtatttacgattaatcttttctcatgttttgagtaccaggaaaaaactttaatcagatcttccatatccgtaatatgcaaagggtagtgtccactacaatatttattcccatcagaatcctcactccttaagaacaagcaccaaactggttgttcctcgctagcccttacaatatatccatagccttctttatcagagtcatacaaattatcctcaataataaattcctctagtgtaccgtgttccaaattcagagcattcttttctaatggttttggatttaatacaaactcatttttaaataagtagtccctgtctttgtataaataaccttctgtatctacaattatttttctatcttgcttagaaaacaaagaaaatacttttatcaaatcttctagatttatattattcaaaggacagtgctcaccataatatttctcccctttagcaccatcacgttttaaaaggaaacaccaaaccggaacttcctcactatatcttgcaatatatccatacgtctctgatttagatactcccaaagccatagaaaaatattcttcgattgtttctacttcgttattttgattatcattttcttcaatttcatgaacccaatacgcacagttttgtaaggaattatcagtagcaaagaagtgaccatatttctcaataatctcttcaaattcttctttactaataaaatgaccttctgtaaatcctacacctacatcttttgtataaccaacaacttcataattgtcccccagaatatcatgtgagtaaaaatcaaacttctttgtttcagagtcataagctatccttaatagtcctgacaaagttgaatccgcttcttcaaaatatgtatataagccatctgaaggctttccttcaaaaactttaccaaaacgaattaacattgaaacaccagaaataatctctcctgttttttctagaacaaattcttttttcgttgttaaaactttatcgtattctaattgatatttcattttcttcttcctctcactaataaaattttgtatataaaaaggacaacataacgctatgttgtcctttttatctctcacgccccatttgacgcatatatgctattcttctagctttatctctttctttagcttgatctctttctttatattcttggcacttttcttctaatttagggaaatcacaacaaactccttttaagaatttttgtttatgtgaaggctttccttgtacagttacatctttatatactttttccactttattagtaactcgatccatattttcttttaaaaataaatactgttttaacatcaaattaccatactgagggtctgctgctgttttttctgctatatcaatttctttacactctttttctgggactggaatcatgttattaaccaataaaactccaattcgcttttcatcagtatcgaataatttcacactgacctgactgttaaaatttttatcgttacgtgatgttaaaggtacaaaataatcatgaccattgattttttccaatacacctacatacggtctactatgctgttcatctttattaaaaggtactttactatccgtttctcttaaataatctatatattcagttgaaatggtgtagaatttaggattatctttattagccaactttcttctccccctagaaacaaaaaaagtaggaagaaaactctccctacttttaaaattcttttttagcgcctactacggtaaggctacaccaattttttggtactcactacggtagagttacaccaattttttcgcacctactaaagtaaggttactctaattttgtacctttattatatgcggtttactaataaaaatcaacattttcaacttcatttcacacattttaaaattacatttcgattatttatctctctctgcccatttgttgtaaataagctgtacgtcttccttgttctcgttgattggctactcgcttgcattcatcgttccaatcccatttttgttctttagacggtgcttgcggatattccggcttaaatgcaactatgcttccatcattcttttcatagcgaaaatgtatcaatcgttccgcaaaagctttacctgctttgtcattgtcaacgcataatgaaagactgtcaggaacatcaccaatccgctcttgactcttcatatagtaattaaatactacttgtggtttcagcccttccatactaactaaatgcgtatctttaaggtcatgtttatgtagtgatacgtagcttagtaaatcaatagaggactcaaagaactttagatttcggggttcgccctgcaatacattaaaaccgtagttagccgtagaatttttttggatacttttccacgccccacgtttgtatttatccgattttacgactccttgctctgatccacccattaccgctcccgtttcacggtctttccataggaacaatacattgttgtacttatcttgtttaatcagtccttttttatgcaatgcatctacaacttgcggatcaatctttctttcctcagtcagatattcccttgctctatcgaattgaggtacttctttttccgcaaaatgttcacaatcataaggctcactcacaaatgtaacctctgaagctttttcatagtcctgttctccgtccagtaatcgctgcatcgccccagggaacgaagcatcttctacctcctgtacaaacttgataatattcccgttaacccctctactgttccagtagaactgatttttcttcctatcaatgattaagctatcgtgttccgctaaacggtaataacgttcactgtcagactttacagggatatcgttttgcatacaataatccacaatatcaagtgatgctgccttttcaatttcttcctcggtatatcttttggtattcttcttttgttgttccatagcaattcctccaataaataaagaccatgcattttcacatggtcattttcgatttatttatatttgtatttgttctgctttaactaaataacgctttaaaggattctaaaatgcctgaagccccaaattggaaacttgccattccatatgaatacaactcatacacaactacaatcgtactaatcattaaaatcattttttccgctataccgttatagctgtagtaaaaaatatggaatccactttggaaatttctattggataatggcagcagccacttaataccttttttagagaaactgtcttccactagatgtagaaagtatcctgcaaggatgcacatgccattcgtaaaggtcaatggtgtcatcccgactgcaaataaaataggaatcaacacaagcactaaaccaaatagtgaatgagtgattcctctatgaccaaataccatattcattaagtccgatactccacgagttctcctgccaatccatgaatgttgttcatctatatcaggcaacaaagccccaaaactaaccgctatcacatttccaatcgtgaggtttcccgttgatgccaagacaggcagggcgaccgctaggcttgttgtaagatgcgttttatacttcattggttatcccactttcttatattaataatcccgaccaagcatgtgtttcatcatataatgttttcttgcttgctctcttgtttgcgatatttgctgttgttcttcctcatggacggtatctttcccaacatatcgctttccaacttcagggatggtttttgattcttgtacctctatagcgccatgctctttcttcaccgacccgactgttttagcggattccatttgaaaaacttcctctgtttcgctttttcgatcatttacgatctcttctactggattgaaacaaagttctccatcttcaatcttcttttcttccatatatctaagaggagcaagtcgtttttcttcaacatcttcgtagccgattgttgtataataagcatcttttccctctatctcttcaggaatcacctcttctgctactacatatccatagccctcaaagtgataagccgcttcatcctgctgcaatggtttccctgtcgattcacagtaaataaccatatcttcatttactggataaagcccttgatactccacatcaccattcataatttctttgtgtgatttagtaattgaatgattgatatgtttaacagcttcaaatacagaatggttaaaatcaaattcaatgtcactgtctgatacatattcagataggcactccactttcatattttgttgtctatctgttgaaactttagcaattggcgtatcatagaattctccttgaataagttcagcttcataatacggttcaaggtaatctgcaatttgattgaagttttccatttctttttccgttccacatctatttacaacagatagcatttctcctaaactcaaacgcatatcaggatgaatttcttcgattactcgattgtcttcggacagttgaatttcgtaattttcccaatgcttttctaaatcaatacctactttctcgtcaatctctagagctgctttttgttgaatgcctgttactactttatggttatccatcatttttctctctccttattagttgaaatttaaaataaaaaagaacacctattaaggtgtccttttatctctccatctgttgcatgtatgccatacgtgctatttttctagcttcttgctttttcataacggctgcttcttcatcttgttgtcctgtactcaattcttgattacttccttgacgttcaatttcttcgctcattacttctttgtgcgcttttgtaatagaagaattaatactatcaatcgcttcagctacagagtggttaaaatcaaattcaatgtcactgtctgatacatattcagaaatacattcaaccttcatgtttttatcttgatctaccgatactttagcaacatgtgtattaaataactctgtttcttttgagtcagcttcataatgtggtttcatttcttctgttacgattttcaaattctctacttctttttcagttccaaatttattgacgattgtatttaattcacccaaactcaaaatcatattcggctgaatatcctctatatattttccatcttcagaaagattaattttataatcattccatcgattttttgaatttagctctgcccgttgagagacagcattccaatgactccctaaatttaacccaatgttttcagcaacattttgttccgctttttcttgtatacgtttaaggactctttgttgaaaagcaggaaattcgaatttcttttgctccttttcatcatttactgcatctttttcgtttaattcttttgtatcgttactgattactggattgtgtttctgtagttctttttctgtccccctttgtaattcagagatttcctgatctattacattaataaacgttcttgctgtatcgtgaatgtttattatagaagaatctttttcttttaaatcttgatcactttcaacccatttactaatataaggtactgtattttcactcgtatccatcccgtaatgtgtacaaacaatatgtgtagccattcgtgtttcaaaatctcccgccacttcatctttactcccttttcctttttcaccttgcaatttttcacgaatcaattcatagatgacttcaggtatttgctttatttctaaggtgttttcattttcatcaagtgctttactttcaattttttctttctcagctacaacatggattccagaaatcaacatgtttttattttcttctgatacctcaaaatcaaattgacgattcgggaatatctttttcaagtcgtcactagtagcattggtttgtgaaatatctaatgccgatttctttaaatagtaagttatgtctttctttatttttaaatcgcctttcttaacctgtcccttctgatctactgtcaaatcttttacaagaacttctttttttgttttgggatctcttacatattctttgataagaggatgaaaaaccttcatttcctgttctccatttttcaaagaaaagccagccttgttgtaagttttcaaatttgcacatgcatacgcatcagggaattgcgatttaatcacttgcatatttctacccgaataattactaaatctagacataaactcagctaattccaaaaccccttcctttgaatgataataatgttctaagtcttcaagcaccatccccataaattgccttgtttcttccgtacttattcccatatcatcataaaacatcatcgttttctcttctccttattagttaaaattaaaaagaacacctattaagatgtcctcttacctctccatttgttgcatatatgccatacgtgcaatccttcttgtttcttgctgttttatagcggctgcatctacatctttttctgttttattagataaaaaatggtcaaccttattctgttgttcttcagaattagattgaccttttatatctccattatcttgttccctattcttttcgttctctctttgcaattcagaaattttcttatcaattgtatttataaagctacttgcggtttcgtgaacacgcataatagatttgtctttctcttctatatcctgtccgtttttcgtccattgggctatataaggaatggcaaattcactcgtatccatgccgtaatgcttacacactatataagaagttaattctgcttcaaactcttttgtaggtgtgtgttctgaatgatccaccttcacattatgtaacttcgcatgtgctaattcatgtatagatacagctaattcttttgtttcggtgtttcgagtattcataactatttcggaatgagaaccgtcaacagcttgtaaatgcataccatgagcattacctaattcattaattaatgcgccttgattgcccatcattttaatttcaatcttttctttttctgctaatgcctctatacctgtctttaataactctttgttttcctctgtcacctcaaaattaaactgacgattcgggaatattttaggcaagtcttcaggtcttgcatttgtttgtgaaacatcaaaggctgttgctttcaaataataatttgtttgcttctccacttttaactcaccagttttcacttgttgcttttgttccgcagttaatttagttagtggaattgctaattttgttttttgatctcttacaaattcttttacataaggatgaaaaaccttcattgctttttcacccttatttacatggaatcctgcatctttaaatgttttaaagctcgcacaagcatacgcatgtggaaattgtgatttaattaactgcatgtttctaggagaatagttactaaacttcgccatgaatccagccaactcaatcatgtcttcagtggattcatagtacttcgtaatatcggtaaaaaccttgtccatgatttcttgtgtttcttctttaatttgctcttttgtcttaggtgtatatttcttttttgtgtaggtcattcgcaaattaaccctctttcttcatcatatttaacaaatggtaaactatcatgttccgctgctccttgcataaactcgacataggctgccgcttcttcttcagaaacttttacgataacttgcttattaaataaatatttacttagatgaacctcattctttacttggtcaacatgatcaatcatataaaaattattttgaaacatattacacactacctttctattattacaacgctaatttgaagtatattttttcgtaagtttgttttcctttgtcccaacttatattccaattctctaacgaacccgagtatacttctttaaattttagcattggattatccattgaacccactatcactattccaaatcctttatcatatgtagaatcaccctcaaattttttccacaactcaaattctgtaattttatatttttcagcaaaaccaataaccgtttccagtatccagttttcattttcttcttcagttatctgcttctcaaaatccacctcaaaacactcaccataatcatcgttccgaattagaaaatgattttctcctttctttatattctcttctataatggttctattttcttcattacggctaaatcttgtacttgaaacgatggaataatacacttttttctccactttaaatcctccttttaaattaataatccatttcttgttgtcgtgcaattcgttcctgtacacgctcatactcttgttctgcacgccattttgttaaatcatcattcaacgccgcttcaatatttcggacatccttttttcgaattaatggcggtttgtattgagaatatgtagtgtactctcttcttttttctaaccgccccctttcatatttctttttaatctgttcattcttttgctgaaactgatacaacggattgtcctcatatggttgctttttcttcagttcttttagtaaggaattacccatacgcttctgcatatctttcatttgattctttgcgtaatctttttcttcccgttccgattctccatataaacccttctgaaaactagattctttttctacagcttcctgatattccttaaaaataggattttctttcattaacaatcctgtcagttcatcaatcttatttcttgtttcattcggcattcttttgctgccatatgtccaatcttttttgttactaggtaacccgttgtatatctcttgtaacaaagtaacttccctacttggttgcttttcttttgattgtagatactcctttttgacttcttgcactaagttatttcttagattagatattcgactcaactcacttgtacgatctacgagagagttcgcaaaagttgttttcatatgatctagtgtactttgttttctttttccttttggttcgtaaaaagtttctccatccactttaacttcgactagcttccttctattttctttttctactgttccgtagtgaatgtgaatgtgttctgtattccgatgaatagatgcaaaccaaaagccgttattctcttcaatttgttcatccttgaataactgttccatcattttatgacttgcatttcgaatccgattttcatctaacacgtccgttacaggatcatatagtttctgttctattagaaagtccgtatcgaatgagataacatcttgataataaaccgaacctttattttgtgcttttcccaccaactcttttatttcatttaaatcattggaggtaattacatttttatttttcgagaaaacacccgacaaaatttcttctgcttttatcttctcctgcatttgttcaggagacaaatcttctatatgtttattaagtaataacacctcttcttcttccgttttagtcattttctttttgctttctagcgcatattttcttcccatatagctaacatacttttcaaaatcagtcgtagtattaaaactgtttggagaagttaaaagcacttttgcttctgcttctttttcagatacactcactttcttttgattagaatgaggacttcccctctccatatcaaaagagtcaattgcattttgcaatcgactcagttcggttagttctgtatttgttaaggtatgtctctcttttaaaagtgctttttgtctcatgcaataatctacatacgttgtaaaactcttttggtttggaatggtatattgagatgttaatatgatacttggtgattttcccatacatcattctccttcaagttatgttaattcttttcgtctatgttcggggatttgttcccactcaatttcctcatacatggtctgtcctaatctagaaattgccttatgtggtttaccttttttcatgacaatttgtacatcatccgtaatcatcggtaatgttttctttgcaaaagatggtgttttaacttctctctgtatgtgttcctgctcttgcatgtttacttctataggttcacgtttaacagttcgagagaacttcccttccgatttctttgtaacagcagaagcaatttcacttttaacttcctgctccaattcttctaaacttaaatcgcttcctgatcgtgcaataagttccatgtttaacttaattaatatatccatttgttgtttcattgtattaacggcttgcgttaaacctttcacttcttttttcaaaagtgatacatcatcctcgcctttttccttcctcatatcttcatctaacaacccaattgcacgtctaaacacatccgctttagttttatactcaggatgctgttgcaagtattcctccacaatatcattatgaattctagtaatcttaaactttgctgtatcagacaaaaccacttcactcatattctctctcctgtctttaattacgagtagctaatttcattattaattcattagttgcatctatatactcttgtaacttattctcttgtctttctaatgacacggtaacattgccgactgcttcatcaaatttatcttgcttaaactgaagcaaagaatgttctacatcgttttgaatgagacttctcaagtattctgcacgagtatactttctcttcaatttcacacttattaattcacacctcttatcaatatcttttatatatttaggatcaatacctcttaacaagatgtccatgttattacttcctttctgataaatgcataactagaatagtcgtatttcctcctttctagttaagaactaaagacagtgattaaaaaagagcataaggaaacctgatatcactttgtaaacaaagcgcttaaataggctgtgcctattaggtttctacttcactcaaattgatatcactaatcctctccgagtggtcgctcagtggtcatattttaaggatagtggtcatttcgtggcactcagtggtcacttagtggtcactcaaaaacactattttttatatcgtttttttcttttcactcagcaatttaattttcttttctttcattttgatgtcttcttttaatacatcaatttctttttgatggttgttaatggtagactcatttgaatttattgtgtttttggttttcactttttcgccctctgtttggtactccatttcttttgttaacttttcatttttgatttttaattgcttcatagctgaagctttatcatcaattttcttctctatttctttcatttcttttctcaatccctgttgcgaaaatgcaagatactctttttcatagaaatctttcgattcctttttcaattctttattaatcaatttttcattttctaaaacgtacgttttcaagctccgttcctttagatcatccacgtccgtttgcaattcaggatgaatatattcaggcttcacaaccgaagatacaacaccaaattcttcaggaacattttcactaattaccacaatgtagttatcacttgcccgataaaccttcgttttcacgttattatctttttgtttaatgtatttattctctactttgtatttcatattacttagaatttgagagtcattatctgcccttaactcataatcaattcgtaacgtttgattgactggattgtattctttttttgcaactgaaatctttaccgtggtggacaaactctgatactcacctattttcatttcttcaaatttatatgtcgctccactaaaaacaggagaaatacaaagtacaaaaaacactgtgaaaaaacttcctaaagtatataaatacgccttcctttttgtatttgcaggctttctaccttccttattcattccaaaattaaaattcattttgttgtttctcctttcacatttactacgctcacgtgagcgtgaatgttttcaagtttataatttgtatacttttctttcccattaacactagactgatattcacgtacaatgagccattccactttttccccaaagttataatcaaaccatgttatcgggatttcaataaacttatcttttcgaatccccttcttttttcgtagacttaaaattaaatacctaccttcttttacataatcatgattgggttttagttcactcaaaagcatgatgttactccttcctgttagatttatttgttaaacgaaaagccccatactagttagtaaggggcttttcgtttacatcattttctattcatcgtttcgctggatacggattatactctacaactttaatttcttccccttgcttttctagcgttatctttacaacactgttaatcgttgtttttttattttctaatccctcaattgtgtactccacatcaagtaaagccgtacatttcttagaaatatcaccttctgaattaatgtatattgcagccttatttacatgtgatttgaagtttggatcgcctaaatcatctgtattaggtgctactacatctactacctttttgtccgttatttttaacaagttgtttcgtctttcgcctttattttgtaccgaataatctaaataagcatgtacgaattgatttgcaacttctctgtatttgttttgtaaatctactgttggattactttcttttttattttcgtccgctgcaccctcatttatttttttactttcctgctccaacttcacttttaaatctccgatttgcttctctttttccgctacagtcacatgatgttttttatccttcttttcaaattctttctttgtgctataactcagtattccgttaaaagccagtgataaaatcaacactacacctaaaatctttgatatattattcatttattttgcacccatttctttttttattttggaactactcttctaattcctgcatagtacttttgccatcctggtgatgtaaattggtgataccctatccctgaactttcagaatcatacattgtattagcatcaacatatatccctacatgacttacatgatcgggcccaccgtatgtccctttaaagaaaactaaatcgcctggttgtgcatctttcggatcaacttctacagttgcatagtattgttctgatgctgaaccatttaaattgactcctgctgctctaaatgcccaagaggttaatccactacaatcaaatccctgtgcaggagttttcccgccccaaacatacgggtttccgttatatttcaaagcttcctccattattttcttaaaggtttctgatccgtttactggtgcagtcccgttattaaaacttaaatattgtttcaccatttctgcataataaaagttaccgccattgatatagcgataaccaccgttgtaagcaattgctacaggttgactgtatccaattgttgttccattcctattaccaccagcaggtgcaacaactgttaaagaataataatcagccgtttgtaaagaatgcgttttactatttgtcgctaaccaatgcacataattacgaccaaagttgtatgtttgtacaatggctaacaaatcattaatccctagcattttcgcatcatcaaatgcgccttttaaatgcataacaccgtagtaaatagaatctttcgggttagaaattgtattcattgcccaaccttgtgactgttagtgataggtaaggatttgaagttatctctaccttttcccccactccacacgtagtaatctttgtatttgtcccacgtttcaatgtaggagcctcctccgttttagcgtgggagcctctctcattagaatgtgggagggtgtcactttctagcgtgatagggtcttgatataagatagaaactttttcgatgttcttcacaattggttccacatacataacgttgttatgcctagttccgttaactatgatcgtacgaaattcaattgcaattaattctctttttactaagtatttgcatgcttcttgtacttgtcttttggtaaaaccaaatgaatcagccaattgttgataacttttttgaagtttgtctgctttaaatttttgtttatattggatttcatttgttctttcatcctttatttcagttggtttataccaataaaaaatttcgctaagtattgtaatcgcaaccatatagggcttgccattttctaaagtaaggtacttaaaccagccctggtctaaagtgttaccttgcaggtttattcttgcgacttttattacattggtattcattccagtcccccttctctatctaacattttttcaatatatctttactactagggtatttgatatttctcaacaaaaagatttaatattttttattttcaatcttttatttttcactttttcctgttagaatgatgaataagttatattctttcacgaaataccctgacttttgacctgctataacaggtctttttttgcatctcgtacgcaacatgtgttatgatgacatcacatgtgtttctattagatcaccagccccaactggtggtttctctttatcattcttttccccaagaaaaaggatttttgtttgattggcttataagctggattcatctttaaaaatgcccgtgtctttcttgtttgaacagtagattttttcatctctaattttctagctatttcttctgtggtatacccttcaccgacgtgcagaataattgacttttcttgttcttcaagtacactcgtcacttcttcaaattcaatggataatatcgcttctttttccacatcaataggagatactgcataaaattcttttactgtttcctcatctcgatgcaaatcaatcgaatgaatattcattttattccgttcctcatgaccaactcgtctgcttatcttaaaaggcgtccctttcaagtgaagctcatcactcattgcccatttcatgcctttcatcacgtatgcattgaatgtatctactctctctggatcataattcatacaatgctcccataaatacagatggccaacttgtattaaatcatccaaatccatattgtttatttctgcaatctgcccagctcttgcgatacttccaaattgttgcttgatcgctgcaatcactaaatatttcttttcttcaaataattcttctgctgtcatttttttaccatcccttcttgtttttaaatataatagtttgctatacaatgtaccctctccacggctgaagcattgatgcctctacttcttaaatgttccacaatccctaaaatgcttttacgatcctgttcaagttggttatcatatttttctttctcacggtatagcgctataagctcccgtcgagccaatcgtgcttctttaatccaaatgcaaagtaacaatggatcattcttttgaatcgcctctatttgtttcttttcacaatgctgcaagaattcatctagtatttgttttttctgtacatctttctttaaaactgataacgtcatagcgctttctcctctcaaattcattccacatcttttgtaaattctttaattggtttatcgagtgcataaacaacaagcaaaagcccacagatcagaaacccagtgatacatactgaaaaaacactttcttccatcatagttatttcctccttccaactttttcacatctcagagaacttaatttgagagtttactatattaattttctcactcagcacaataggtaacgtatacgctccaacaatctttgttgcgagtgccaaatgaccacgtttaattgctttatggcttgttactccaaattcacgatataactgattatagatatcacggtagaccttacctctaatccccgcatgttggtacgcattagactgtttaccacctaatagcgcaacgccatgacgcttgactgcatttgatatttcatcgcattctacagcaaataacggcgcattttctcgtaagtctttgacatctgatttgatgtgctggagttcttgcttttgcccttctagcgcttcaaaagtaagctttaaaatactcatgggatctgtaggtacatgttgctgttttttgatgtattccttcatacgtttaaattcttgtataaatcgaatttttgtttgcactgcttctttcgtgttgtacccaaaaacaactaatgtaaatgcttcttctgttaaattgtacttgggatatattcgaccacgttcatttgtgtaagttgactcctcaaaatttaggagtgagaattctgctcctgcataatccatttgaagtttaatatctgatataacattatcgtgtcgtttaccgaaaatctcagcaattgtcaaactatccgttactacctcaccattactttcaaataccagttcgtttgctactgttaatccatccatgtaaagccctcctaaattttaataatgcttgtccagtccaccaccctatgcacttggaatgactcgtattgagtttgtatgacgatgcactaaatgtaattcgccatctatcttcttaaagattagccaattatcaggatttaaattatatgaattgatatgtatcttttctctcttggttggtcttttaccatttttcataaatgctcctcccaccttttctgtttatttttcaaacagctcgtccactgttgttttgaagtattttgctagtttctgagcttcttttagggtgaaatcacttttaccgtgttccttagcaaaatatgttctcggtgaaatatggattaaatttgcaattgtttcttgcgtcatacgttgctcttttcgagcaataaataagtttttgtgcatggatatcattccttttctaattaaattagttttcaatcataatccaacataaagttaacactgttaacatgtcagttaaaaaaaatcgatgaataaatcatccattggaattttaaaaacttccgacatccctaataattttgaggttgttggctggatttttccgttttccattaaattaactaaagaatgactacagtttaataattgagccaattccctctgtgaaaaccccttattttttcttaataaagacagtttcttcccattaaattttttcattttcgccctccatctgttacctgtgttaacatcatacactaaatatattttctttgtaaaccctttttatcttttttttaatatcttgttctttaaaaaacattgctttgttatacttttttagttatcataatcaatagaaaagtttaattcagttaaccggagggtgttagtaatggtaacgttaggagagcgtataaagtctattcgtacgaaaaagaacatatcacaaaaagaactagcggaagctttaaatgtaaataggtctgcgatttccttatacgaaaccaatagaaagagcccttcacgagagaacacttataaaatagctactgtcttaggcgtctctatcgactatttattgggtatgcaaaccgacctttcacttgaaacagaaaaaataaattcggaaactgctcatctcatgaaacgtctagacaatatgccgcaagaaacaaaacaaaacattataaaattaattgatgatttaattaaaatacacgaaaaaagccatgattaattattattaatcatggctttaattttactaactgcaagtatgtattcttcatcctcactaaaaatttgttctaacattaacatctttttaattttatcttcagtgttttcctgtttaatttttttaacatttatcttgttcatttgtctaatctctcctataagtaataatctcatcacccattgtaaattagcaccttttttataattttattactaatttttatagatgtctcaagactagccaaaaaacaaaatgcttttttttagcaaaatatattgacaaataaaaaaggcccactttttcaacttcactaagtgggtccatataattcaaccgcctggtctaacatccatataattagtgtatttatccaaaacctttccttctaatcccttattagggacaaatggcatcatcattaaagttaacatcactgaaaatatcaatattctcttcttcaacttcattccctcccacttcttgtttataatccatcatccacttaattatagcagaatcttcccctctcttatataattctcttgcgcttagactggaaaaaaagtaattgccttgagtaaagaattgctgaagacatttatgtaagctttcattagacatatcttgcattgccttaaataacacaataaagtcttccttttctttttgataaaaaacttgagcatatttgtcgacgtcagccaatacactagccgtcccgtctgtttccgcagcataatacatttctaccattttcatattataaaacgcctcattctcgtagccctgatcaccaatccgtttagataaattatatgattcttttaccattgataaacatttctgtttattttcaagtaaataagacatgccaattatatatgatgcatctgaaatagctttgataccaacgtttgcatttttaataatagaagcatattttcttgccatatctctattatttgatcgtagatgtacaggtgctaagacttcgtataccttataaaaatagcaatgctggagaaaatccttacgtccaccacttaactgtttgagtctctgctctatttctttgccaatcccaatcatcattggaaactctttagaaaaatagtaaccatagcatttcataatgctaattaatattcgcaaacaacaatctgtaggttgtcgtaagttatttatttcttcaatcagtgattccccatcaatctgccttagcatgtattgatacagtatttcgtaaacatccacaaactcctgaatacttcctttatcttttcgatattttcctatcaaacgttttaacaattcaatatccctagtaatcgaagcgtactcaaagctttgtttgattagttctgttgtatcaactttcaagcagaaatcacgcattatagttttgtagttttcatccggcaacgttaatacttgcgacaatttcaagagactacaaaaactaattgtcccactttttttgaacttagacatatattgaggacttactccaatagcctcagcaacactcccatatgttagctcagggctattgtcaattaattcacaaatttcaaggtgtagcggcttcaaagtattcttccctccatccggtaacataaaaagcctccttaattttctcaactcagaacacattttaaaattactaggtgtgtgttacactgacgaagaactcgtatgatgcaaatgtttgtcctaagttagctaggatgaacagtgtgaaaggctttgttagttgtacctcttacacacgctctgcgagtttttatgcttttatttattttgttttttacgattattctgtctattaattctacagaaacctatttactgtacacagagctaattttagcatgggctcatattctattccacactaaaatttatttctcaatataacttctgagaaaaatgttgaaaatatttgaatgcagtttcatatgttttatattcgtaatgagcattggttcatttttcaatatattctgctaaaatccatgtagaaaccagccattttttaataattgcaccccaccaatttgaaaatatattacaatataacacgaagtaaatgcttgaatttctcaatatgcgtcaagacattattatggtactatgattttatccttacttgtatcatcctgattggtttccctaccaatcttctccactattattagtggggagtttttaagttatatgttattaaaattaaagtggttcaagtcaaagtaagacgctcaatttattttgagcgtcttttcttttggtaacaaacaagttataatctactcaataaattgaattatcgatctttatttatacaggagggattcttatggtgatttacaaagataaagaacgaggaacatatttcttcgtcgtcagagtccgtcagtttgatggcactcaaaaacaagtgaaacgtcgtgggtttaaaacaaaaaaggaagctcgtgaagctgaagctaaaatgttagttgaaaaagaaacaaattcaaacttaacatttgctcaagttgcagatagttattttgattggtattgccaaagacgaaagcacacatcaataaacgttataagaaatataatatacaatcatttaatacaagaatttaacaaaatcaaaattgaccagattacggccaaacacattatgcattatcaaaataaaattattaacaactattccgcagaccatttaaaaaaaattcatactgtactctcttccatattcaacttcgcaattaaatttcatggattaacaaacaatcctgcacgcattgctggaaatttcgaaaaggaatcgaataaacgaatgaatttttgggagtttgatgaatttcatcaatttattgatagtgtagacgatttattatataaaacttttttctcgacactttattatagcggtgctagaaaaggggagctactagctttaacttgggaagatatcaattttgaagaaaaaacaataaatataaataaaacagagtttaacagaaaaattacaaaaccaaaaacaaaatcctcaaatagaattattatgttaccatctcttgtaatcgatttattgaaaaatttaaaagagcatgctacagtaaaatcacctatcaaaattaattacgttgtgtttggcgaattttatactagcatatcagcaagcactctcgatagaaagtatacaaactatgtacttaacgctggtgttaaaagaatcttgttacatgaatttaggcattcccatgcatcatatctaattaacaagggtgtaagtccacttatagtagcacaacgtcttggtcattcagatgtggctacaaccctaaatacgtatagccacctatacccttcaaaacaagcagaagtaattgcatttatagaagaagatttagtaaaaaaggtaccaaaatgttgccacagggtttaaaaaccctgttataatcacattaagaaacactgtgaccatgtaattcagcaaaatttgaaatatcatgaacgatttcgcttgaaagtactgatttatgtataacttctttcccacattttatatgtgcaccatttgctgaaataaacgtatttatacctagttccttaaattgtgagcataaactatacggtcttccagttgtaacaactacgtgaattcctttatctattaaccttcgtatcgcttcttttgtactttcgtgcatgcttctatcaatctcacttaataacgtaccgtcaacatcgaaaaatacaactttgtacataagtctttacatcccgtccaaatgattcgtatcattaatgaaatgcaccgttttttgttcaccctcaatttcaattaaacttattcccgtatctcccattttgaaatagtagtccattgaaattggcattttgaaaaatgcacgtaatagactattaattacgcctccatgggcaacaattgcaattcgatcatatgtattctctatcataattttagaaaagattccttctattctcattcgaaactcaataaatgattctccgttttcaaaacggtcatgaagaaactttggctctggatatttctttgcttcttcaaatgatacgcctgcttgcactccattattaaactccattaattcctcttctaattgaattggacaaccaattgcttctgctaatatttcacccgtttcacgagcgcgttttaatgtgcttgcccaaatgaaatctggcgcaaaatcttttttcactttctgtacaagtctttgtacttgttgtctccctttgtcagttaactcaaaatcagctcgaccttcatgcacatgtaaaatatcagcttctgattctccgtggcgtattagtagtatttgcatgtttctctctccctttatttaacattcataaaattccattatatcacattttaagattccaaaataaaaaaggaacggtctcccgtccctcatccattcactttttccgcatcattccaataatatttactaaacgcttctgttaacacatcaattgtgttatataattcatctaacgtattatcaacaccaccaacttcaattaacatcgcatttttcgataaatcttgattataaacgccatttccatcttttttatacttgggaaaaatccctctacttaatccgtagtagttttcatctaaataactattgatcgctcttgcaattttttcattttcagcacggccttcattttccatcccaattataaaatataatcttgcatacgattttccgttaattacttttgttgttactttcttacgctgatcgtcacggtgtatatcaattggaaacgcaattttattattttgtgctaatgcttcttttacatattcatgagacgctttatatgattgcggccatttccattttttactcgctaataaatcacccatattcgttttatcgtgaactaccggaattccttgtccttcaagttgctctttcatacgtttccctagtaaggacacatttacatctggacttgatggatccgtagcccctggtaataatggaaagaaggattcccagctatgtgtatgataaatatatactgcactttcaccttttttcgctccgttctttttctgaaccggattattcttttccgcttctgtaactttatcttttgctacttcccgttctttcgttacttcttcaatcggtacactagattcatttgggatattcgtcaagtttgtcccttccccagctacgataatattagaataatactttgacataccaggtacttctttaccgacgaatgttcttaaatctttaattttcaaatctgtcgcaatagagaacattaaatttccaactgactctcttttattcttcttaaaataatcaaatccgtaatagcgattctcactttctatcatttgaacaaaaccttgcatcgatacttttccaaaccattgatttgcataattcgatttcattgtatgtaaaaatgacgtcaaaatcgacgctatcataattactattagcgcatataaaaggagtaacgaaatcagtttcttcccatgtattcgagttgcatactttttcactgcatcaccttctttatacatggatatgtacaagcttttcggaatatacgcaaaaaaaagagaaatggtatcccatttctcttcctcacttttattgttcttttcctgtatcatttgaaggtagtttcttcacttgtttttctttaaatatttctccaattgccccaagagtaccaagtgtttcaattgcattagacggaataaagactttatttgctggtccttttgcaacttcagctaatgattcaaatgatttgtaagcaagtatacgctcatccaaattcgcttcacgaagcaattcaatacgattttgttctgcttttgcgatttcttcaattgcccttgcttccccttgcgcttctaattcttttgcttcttttataccttcagcttcgcgaatacgcgcttctttatccccttcagccatcaagattttactttgcttttccccttcagcacgaaggactttatcttgttttgctgcttcagcttctaaaataatcgcacgtttattacgctcagccttcatttgtttttccattgatgcttgcacatcttttggcgggttaatatcaacaacttcgacacgttcaatacgtacgccccatttttctgttgcttcatcaagcgctaagcggatttctgttgaaattttttcacgaccagataacgtttcatccagttccattttaccgataatttgacgcatcgttgctgaagtaatattacgaacaccatattcatagtttgaaataccatatgtcgcaagttctggttcaacaatttgatagaaaataatagtatcaatttctacttgaacattatctttcgtaattaccttttgcggtggtacattcgtttgttgaatacgtaagtcatgatatacacgaacacgatctacaattggtattaaaatatttaaccctgggtgcatgatacgttgaaacttaccaaatctttcaacaaccccaactttttgctgaggaataattttaattgttaatgcgataaatgtaactacaattagtgcgaatataatcgttaacgttaatgctaccatatttattcactctcctttttcacttgtaatatagtactatgcctctttataacaacgactttttctccagcatcaattgaagaatctgcaatagctgtccaagtatctccatccactttcacaataccattcgcttcatttgtaatcgtttgcataacaatcccttttttaccaacaagcatatctactgtatcagtaaaaccttttgcttctcgaaagttttttgaaattcttttcgtaaagaatgtcaaagttaaactaacaattgcaccaacagtaacttgtaacagtagtgcatcaggagcaaacaaagcaataagacctccgacaacagctccaattccaagccaaagcatgtaaaatgtaatcgacaacatttctgcgataaataaaataccagctattataaaccaaattacccaagcagccatatgcaaccctcactttctttctcattttctatatgtatatgaagaaaagaatggtttatccgccctttcttacacttgggcgtttgctacaagctattgtacatactcactgttacaatgatcattaatataatactatatcaatatatccttcattatacatgaaaatccctttcaaaaagtgacaaaaaattaaattctttaaaaattttaatttttaaattacaattattctaattactaaatactattttttatagaggtgataatcttattgagaaacctgtcactaatctactatttaggttccaaaatatgcattactctcgctgacatcgtatatgtaatgattattacaactcatatttatatagcaactaaatcagctactattactgctctttttccattattacaagttatcacaaatctaattgctaacatctctgcaccacttataataaatcgttttccatcttatacgctgttatatacgctccaatggctgaaaacagtctttttactattattaatgattttgttcccggtcttatccacaaacattatagctctattaacttttatttttgtcatttcattatgtagtgggtggagtgctccgttattatacggtattctcccgcgccttacaccgaaagaaaaattagtaaaagtaaatagtatcttttccttttcaacacaaattgtgcaagccgttgcttattcatttacgagtattgtcgttcttctcattggcgctacttctacactcatgattaataacattttaatgattttcggatgcattgccttacatttttcattacgttccatacatactgaaagaatagcagattctccctcttccaaaagtactgttttattggaaggttggaaactcctatttcaaaatccttctctccgtaccgttacatatatggacttaatcgaaactttcgcagggacaatatggattggtgctattacgatggcatacgttacgactatccttcataaaggcgaagaatggtggggatatattaatacaagttattatgttggcacgttaatcggtggtctattagcatggaaaatgagttcctatattcaaaacaatttaatacgatctatgtcgattggctctcttatatttagcattcttacatttttatatggtatgacgagcagcggatttattgcgctttttctatgtgttctaatgggaccatgttatcaaattagagatatttcccaaacgactgttttacaatcaagtgtcgcccctgctttattatccaaaatgtatacagcacatggtgcacttctttcaacagcctctggactatctatgcttagcattggcattattactgatatgttcggtgttcgtacaatttatatcatcgcttctattcttattttatgttccgcttgtttatcttttagtttattaaaatatcataagacagagcagaacgatatttcaatttaatcactaaaacaaagaggacagggattcctgtcctctttgtttattctattcatgataagttgaggatttttctatgctttgtcgcttgttcaaaagcataagctaatttaattaatatcccttcactaaaggcagtgcttgcaatggtaattccaaaaggcctcccgctttccatataccctgctggtattgctatagacggataacccgcttttgcacatatagtagaacctatataggaaggaaacagtatcgcatcaagattatatttttccaatgcaaaatcaatgccttgttcttgagaaaaatatatatcttctaatctcgcatttaaatattctggatttcgtaaagtattaggaaaatcttttcttccctctaacttagtttgtccatattttaaagctctttctgctatgtttttattaaactccattaactccgaaatagaatgtaccgggatagtagaaggtaatttagaaagatagttatctaaactatgcttcagctcataaagcggaactccccagctccattctctatgaaaagaaggaatatcaatattttctactactgtcgctccttcattacgtaatacttgaatcgtttccttaaacaagatttcatcatactcaccattttcgtaataatcttttggtgcatcgttaaacacaccaatcttcgctccatttaaaccatttgcatcaaggtaagatgtataatcccgatatgccctattttcactttttcgagtaactacatctttctcatccactccagttaaactccctagcaaaatagcagcatctgttaccgttctagcaaatggtccagctgtatcttgtgaataagtaaatggaataattcctctacgactaattaaaccgacagtcggtttaatacctactacagaattttgaacagcggggctcaaaatagaagcatcggtttctgtcccaacagatactactgtaaagttagcagcaactgctatcgcagatcctgtactagatccgccaacaaacatatgatccttgcccgttccgtatggattgattgtttgaccaccttttgcactatatccagcccacatttcaaaagacattgcatttgctaattctgtcatattcgtttttccaattatcactgcccctgcttctcgcagttgagtaacgagaaatgcatcttcactgcttatattttgttctagagctattgtacctgcacttgtatgcatggagtcattcgtttcaatattatccttaagcaaaacaggtattccatgtaatggaccccttataccttttgtctttctttcataatctaacgcttctgcaataaaaattgcatctggattgatttctaaaattgaattgattttcggtccgtcttgatcatactttgcgattctataaagataatacatcactagctcttttgaagttaactttcctgattccatttcattttgaatatcttgaattgttaattccttttttaagattggattaaactgaatttccatttatattctcccttatatgaacttttttagcgtataccccttactttttcatttttttcacctcaacacatcctaaattaatattcctttaaagaaattcaatttccttatttaaacacctttaatttaccgaaaaataaaaatagtctgaaacggattaaccttcgcttcagactcttacattactgtgcgtatacttcatctaacaaatgtaaaaactcaccttgtttcccagctaattcagggcattttgcaatatcaacccattcgtagcaaaatactaatcctttatcttcctcaccagcacttacaatatgttcccaagtatcctttacatctgttagtaaagttacatgaaaaaagtggcatttttcatattcctgtttttctttcatatgtatgatgtaatctgctaaaaaacgttctatgcataaatgacgcaatccggattcttcctgtacttcacgcaatatagccgcttctaacgtttcaccttcattaaccgttcctcctggcacttgaataccagcttcatgtatatcacgatgtttaaaaacaagtaattgcataaccccctctttttctcttgtaatatatgcatgtacttttttcttatataacatcgtcattatacgtctctcccctcaatcatttactctgttacttcttcaagcgtcagttgattatcatacaaatatgtagcttgtggatttcccacataccttacgtgccatggttcataccgataacccgtaatcgtttctttcgcttttgtgtatcgaacaacaaaaccaaatttatgggcattttcagaaagccactgaccttctttcgtttccccaaaaaccgtctctaactgaaatttagcagattgagacgtaatatccatagctagtccagtttgatgctcacttgtgccaggaaccgcgctagacattgctgtttttgcttccccgtcttgttttttatacatcgtatttaatgctttttgtcgatcaaaagatctaaatccagaaactgcaaaaagaaaaatacgctcgttgtcagcctgctgaaacatatcctcaagcgccctcgctgcctcttttctcatctttttcttttcttgatcaccttcactagagtagcgcactttcggaataactaaatctggcggtctatacccatctggtaaacgcctacttttatttacaagtacaagcattgaattcggattattaattaccgcaatatccccatccatattagcaatcgtttctttcgctttcggaaatatgctatttacacttacttcccgcgcctgcttatccttatacattttataattgattcctgctactccaataataattattgcagctacaataccaagtagtgcccatctttttttcatataacgacctcttattttaataatttggccatttcatactcatcgatgccctttccatcgataataagagcagcttttttgacaccttctttctcaaatccagcttttttatatagtgcctgagctcttgtattgtgggccattactgttaattctaaacgccatacatcatgtaattttgcccacttctcaacctctttaaacaatctagtcccaatacctcgcccgttatactcttgcaaaataccaattacaatgcttgccacatgcctctttctttgaatgttatttccattcactaatataaaacctactatcctctcatcttcaactgctacaaatattgttgcatattcattttccataaatcgatggatcattttttcttgttgctcagctgtagttttcctttctcctggttcatatagcataaacttcgtttcttcatctaattgcttacttaattgcaaaaatgatgctgcatcttctatttcgatttccctaatcacttcaatcaccctaccagtttcataataaaaagttttccttataaaaagattttctctactttcccgaaaattcctttgtaaatctcctactataaattgacaaatttcgatattactataacaacgacaaattatgtctattctgtgacgtctcaccattacaaagaaaaaacgcaagcattacacttacgttttttcaagattgaagtgagctaataattatcgatagatgtcctggctaattcacgtttcactttatccattcactttttctgcctgccaaaaatattcaccaaatgctttagcaagtgcatcaattgatcgattcaattcttccactgtattatctacaccgccaacttctattaatatcgcttgtcctgataagtcttgattatagattccatttcctgtctggaaccctttttgaatgaccccacgactcactcctggatatttcttattaatcgcctcatgtaaagctgtcgctaattgtaagtttttttcatagtttttatttcctttccctactacaaatgcaagctttgcatatgatttatctccaattgtttttgtcgttacattctttcgggcactatcacgatgcaaatcaaaaaagtattgaagatctttatttccagccatagcttgctgcacaatttctcgtgacatcttatacgaactattactgtttaaacctttacttattaacttttgaccaacatcactcttatcgttagtagctccaatcccttctccttctagttgttcacggaaacgatctcctaatatagaaatattcgatacagaactcgttgctttattcggatccgggtcattcgttaagttaagtaaaggtaaataagattcccagctatgtgtatgataaataaacgcaacttgtctcttcccggtcgtttgggacggctgttttttctctttactcgtatcttgtttaggtgcttgtccagttccactagtccgttccttcactacttcttcaagaggaacactcgactctatcggtaagttagaataatttgtaccctcacccgcaataacaatttctgtatcgtacttaccaaaccccgggagctctttcccgacgaaactgcgtacatcattaaagcgaatatttgtagccatagaaaagagaaaagaagaaattgaaaaatcttgattcaaatttcgatactcctgtgtaaaataatgattctcttttccaagtacatacatgtaaccattcatcgataactcatttaaccaattatataaatacgttgactttgtctctttcatagaggttaccatcagactaataagaaaaaaagtcgctagcattgtagtaataacaaataaaactaacttacgcatatttgtaaacttcataaaaaaaaagccccgattcatactatcacctctctattttaagttatgtacaagccctagagaatagaccgttaaaattccggctatattgttaatgaggtgaaatgaattgaagctattaataggaatattaccaatcgctctatcattcattttttatttgtccgctaagcaaccaaaaatctctattgtgctacatatttctgcgtacttggcactgtatgtactcggtacaattatttccattaatatatacgatgttttaatacaagatttagttttcatgacgagcattcatggaattttactgaatccatttttccttattgcaggagcgtatataggaacatacactttgtacctacttttgtctcacattattatgaaaataaaaaatggagcgtaatgaaatgcaaccaccatttatctgtcatacatgcaaaaaaagaattgtgagaaagaaagaccttattacagccacatggtacttccgcttttatttatttcacagtgattgttttaaacgacagcaagtgtttatctcacgatttctccctgtgaatacacttttcaatttctttcttattatatatggaattatttttggcagtattcttatgattacagaaccatctattatttggctgactttcttttttcccattttttatcggtttctttcttattattatgttgaacgttttttctctacataacgcgcagactgacctctcggaatacttaaacattcccactcattttcttttaacatcttcccaatgtaaataatctgaccaatatgcaatgcataatgagcaatttgcctttcaattgcttgcatgacagtatgtgcttcaccgcgaatgtataccgtcttcaataagtgttccggcgttaaagtattcatcgtattaaaaacatatttccatccttcttgccaagctataagggtttcttcttttgagtgatagcatccttcaaattcaccatctcgattacgatctgttttttcaccatcagacgttaaaaaatccgtccatctagaacgcatattaccgtgcagatgcttaataataatcgctatactatttgtttcttcatgagaagaccattgtatttgttcatatgataattgagaaagtgcccgttccccttgtttctttgttgctttaaagttcgaaatcgcacattgtaaatattctcgtccgatatccatattagcccctaccttcaccctagctaatttttgttccatttggcaatttcatattaggctgaagtaacacaacatcatcagcttcaggaacaccaccaagcacaagtacttctgatttgaatccagctacacgctttggtggaaagtttacaacagcaacgatttgttgaccgattaaatcttctggactataccttttcgtaatttgagcacttgactgctttatcccgatttctccaaaatctattgctagtttaatcgctggtactctcgcttctttaaattcctctgcatgtattacagttccaattctcaaatccaaatttaaaaaatcttcaaaattagccatttatcattccccccaattattacttagacaaaatacaaaaatccccttcaaaaaaagaaaggtgcctaagcacctttcttttgtaattcacttgattcatttgatttatagaagaagaaaccgagaatcccgccaatacatgatggaattaaccatccgattccttcgttatataacggtaacatttgtagtacattagaaatcgcgtcaattttaattttcgcactttctaaaccgttaaagaaactaattaacaatgcacctaaaatagctccaatataaattgtattacgcttcccaatccacttatggaaataagaaagtacgattaatacaattgcaactggataaatgatcattaacacaggtaatgttactgcgattaattgcgttaaacctaggttagatacaattaaactaaatacacataccattgttacaatcgttttatgcgaaagttttgggaataagtttgtaaagaaacccgcacacgcagatgttagcccaacagaagttgttaaacaagcgagtataataacaagccctaataaaattttaccactcgtcccatatagctcatttacaacattcgttaaaataagaccaccgttttctgagataccaagtgatgtacttgttgaaccaagataagcaagtgataaataaattaacgttaaaccaagtacagcaataatacctgatactactgttatttttgcaatttgactactctcttttatccctttagagcggataacttgtacaacgacaattccgaatacgagcgcgctaattgcatccatcgttaaatatccttgaataaatccaccaaagaaagcattttctttgtaagcagctaacggcgcagctggctctccaattggatcaataattgcctttccgacaataacagcgacaattaatactaataatggtgtaagaaactttccgaaccaatccactaatttagatggatttaatgataaataccacgttattccgaagaaaactatcgtgaaaagaaatagcatgtaccactctgaaaccattgcctctgataaaaacggcttcatacccatttcaaacgaaacagctccagtacgaggaatcgcgaaaaatggtccaattgctaaataactaatcaatgggaaaataaacgcaaatatagggtggactctagaagatagcgctttcaagtccccctctacaaacgcgacagctgttacagctagtaggggtaatccgactcccgttacaaggaatcctattgtagcaatccaaacattctctcctgcttgttgacctaaaactggcggaaaaattaaatttcctgctcctaaaaataatgcaaatagcattaaaccaattgctaccgtatcacctggccttaaacgtcccttcatgctcttcatttgcatagcactttttcattgtttatctctatattttacaatatgctatgcatcctcctctctgctcaagatgataaaatatgccccttacaaagcagtgtctttctccataatttctccattccccttatttttactctaatcattaatacaattattattttaaattttgatttttttgaattttcaaatcattagagtattattatgtggagtgtagatgtcagacctctttgtttttatcacacatatagtaacatatttagttgcaaaataaaaacatattttcaaattgatttttttgaaaatcgaaattatctacattttttattctcttacacaaatattgttataatctcacctattattcgatcgttattttcaaataactttatacacgtaacatacaaaagccatctaatatgaagtgcaccccaattgttagacacagtctaacaattggaggtgcattttttatgtgtggagtgggggaaaaggtagagataacttcaaatccttacctatcactaacatgaatctgttcaaaaatctgattttgcagctgtatcggctgctcttcaagaactacttgaggtgcaatatcgacattatcaaaatcagctgcaaatgcaagagagaaaaaataatgaccatttaacctttatgaatcagtggattcatcaaatgaaaacacctttatctgtaatagaattaattacacaggatgaagtagattcacgttttgaaagtataaatgaggaaactgatcgattaaaaaagggattagaaatggctctgtatgtcgcacgtttagaagcatttacacaagatttttatgtagaaagagtacaactacataaaatagtgaatgattcggtacatgagcataaacggttctttatccggaattttgtatatccagagcttgaaattgataaggacattactgtagaaagtgatgcgaaatggttacaatttttaattgggcaaatactatcgaatgcgattaaatattcatcaggtagtagagaaaagattaaagtgaaagcttgtaaggaaggtaataccgttatacttgaaattgctgataatggcgtaggtataccgaagcaagatttaccaagagtcttcaaacctttctttacaggagaaaacggtagagattttaaagaatcaacaggaatggggctatatctcgtatatgaaattacgaagcaattaggacatagtgtagcaatccattcagaagttgataaaggtacggtagtacgagtaatgttttttaatgtgtaaaaagtgatcaaggctaaagaacgttggagataagttttttagccttgttttgtattttttaaaaagttttcatatgaataaatgatacaaattagtaaaaattaaagatatgagcacatgaaattgtaaaaataaacttgaagaaaaataattgcttttgaagtacaaataataatatttacgcatacagtattatcatggtacaatatggttattaatgacagaaaggaatgatgggtggacgatgattaactaatcttatttttaaatgttgaaattcaataaatttcaatttctaaaaaataggattagtctgcccaatttccatagaacggtattgctatttatgttatgtaatagcttatttgggtgtaaatattttaacgactaatcctgccaaatttatttgggaggatttttttattctcccttaatgaaagggatcggtattatgaaagaactattaacattaaatgatgtttatgttgaaataaaagaaaatatgttgttagagaaaatgaatgtgacagtaaaacaaggggatgttatcggattaattggtaaaaacggtgctggtaaatcaacgttacttcaattaataaatggaaagattgagccttcaaaagggattgttgaatggcagcaaatgaatatgacaaccgcatatgttgagcaagaaatagaatcttttattagtaatgatgtaattgcaaaagaagcagaacttcttgcgaaatggggcgtgccaacgaacgattttcatactttaagtggtggtgaaaagctgaaaattcgattagcaaaaggatttgctgaaaatcctaatgtcttaatattagacgaaccgacaaatcatttagatgagatcagtacgggatttctcattaaacaaataaaaaacatgaaaggtacagttatcgttgtatcgcatgatcgatattttttagatgttgtcgcaacaaaaatatggtcaattgaggacaaaaaattaattgagcatagtggtaattatacgagctacatgaaagcacgtgagcaaaaaagaaagtcgcagcagcgtgaatatgaaaaacaacaaaaaaagatagaacaagtagaaacacatataaaagaattgagttcatggtcacaaaaggcacacgcgcagtctacaaaacaagaaggtgtgaaagaattctatcgtgtaaaagcgaagcgaatggatgcacaagtgaagtcaaaacgaaaacgacttgaaaaagagctggagaaaacgaaagtagaacgtgtgaaagaagagtattcagttgagttttctattcaagcgaacaaaaaagtaggaaaacgctttttagaagtaaagcaattaaaaaaagactttcatgggaaagtattatttgaaaacgttaattttacaattcagcacggtgagaaagttgcgattgttggaccaaacggtagtgggaaaacaacattactgaagatgattatgggaacggaaactgctgaaggagaaatatggatttcaccttcagcaaacatcggctatttaacacaagaagtttttgatttaccgcttgataaaacaccagaaaatttattttttaaagagacgtttgaagaaagaggaaaagtccaaaatttaatgaaacatttaggattccaagcgtctcaatggaaagagccgattgagcatatgagtatgggagaaagagtaaagtgtaagctaatggcttatattttagatgaaaaagatgtactcattttagacgaaccgacgaatcacttggatctaccttcacgtgaacaacttgaaaatacattagctgagtataacggaacattagtaattgtatctcacgatcgatattttctggagaaaacaactaacacaaaactcgtgttttcaaacaatacgatacaaaagcagctagaagaacctactaaaacaagagatgatattgaagagctacgtttaacgttagaaacagagagacaagaagtattaggaaaattaagctttttaacttctaaagacaaagaatataaagcactggatgaacggtttatggaacttacgaagcagattaaggagctataacgtaaataagggggattaacatgggagaagagagattcactaagttatttaaaatagattgtggagatatatacttgcaagagtttacggtcaaagatgcagagagtatttataaaatagcaaatcaaccggaaatagcaaaatttttaccagactggaaatcaacgaaagaacaaagggtggattggattgcagattatgaaataccagcaaacaaagcatttcttgatgcagtgaaaactacgaataacatagataatcatatgttaaagctaggaatatttaagaaagctacaaatgaactcattggatggtgctgcacaggtatgaaagaagaactcccttcaccaaacagagagataatgtatgctatctcaaatgaatatcaaaatcatggctatgctacaaaagcgactaaaggtttaattgactatttgtttaaagaaacaaatttaaatgtccttaacgcaattgctttaattaacaatgtagcatcaaataaagttattgaaaaatgcgggtttatttataagagccaacagaggatagaaaatcaaatatataatcattatatattgagaaaatctgagtggataaaaatataacgtttggtagtaaaagaccgatagcaatcggtcttttctcatttatataataaagatttattatacattatatttcctactactatacaattattataagatagttatgcgttaattttagtttgaaataattatgttgtcattttttttagaaatcttacaagcgtgtaaggtaaatgaaagatgaatcaatatgagctgtaagacaattcatttacactttatagtgagcagtggaaatgaagggagaatatacatggaaattttacatgcaaaaagtattagtaaagtatataaagggaaagtaccttataaagcattagtagatattgatttatcaattcaagaaggtgaatttgtaggaattatgggtccatcaggtagcggaaaaacaacgttattgaatatggtatctactattgattctccatcatcgggagaaatatttattaatggcacaaatccttttcaattatcatcagaagaattagcgttattccgcagaaaacaattaggatttgtttttcaatcatttaatcttcttagcacacttactgtaaaagaaaacatcgtattgccgatgactttagatggtgtttccgtgcaagaaatgaacaagcgattggaagagattgcagagaagttaaatattacagatatattgaataaaagaacgtttgaaatatcagggggacaagctcaaagaacagcaatcgctcgtgcaattgttcataagccgcaattattacttgcagatgaaccaacagggaacttggactctaaatcttcaaatgatgtaatggagatgctggatactctaaataaagaagaaaaagcaacgatgatgttagttacacatgatccgtatgcagcgagcttttgcagccgagtaatctttattaaagatggtcaactatataacgaaatttattgtggtgaaagtaggcaaactttttatcaaaagattatggatgtcctttctttgttaggagggaaaaggcatgacttttcgtcagttcgcatttaataatatttttcgcaataagcgtacatatgctgcccattttttaagtagtgcattttctattatgattttctttacgtatgctcttttattatttcatcctgatttacaaggtgagttgaaatcgacaagtgcaacaataagtgcatttggtacattgggattttcagtttcgcaaggattgatttttgtattttcatttttcttcattttatattcagttagttcgtttttaaaaacgcgtaagaaagaatttggcattttaatgatgcaaggtatgtcaatgagacagcttaagaaattattattaattgaaaatatgttgattggacttggttcaatttgtatagggattttcattggactcatattttctaaactagtcttattgataagtgcaagtgtattaatgattaataatggtttacctttttatataccagtgcgggctgtattattaactgttatcacatttcttttcttgtttttaattgtttcattatttacatttaaaatgataaaagtaacggaacttgtggaacttattcgagcagaggaaaagccaaaacctgaaccgaaatcttcagttttattatcgctactttctttaattagtatagggtatggatatttttcagtatttcgcttcataccaagtaccaattttattacgcttggaataggtgtgctcctagtaattataggaacgtactttttatatacacagtgtagcgtgtatatattgcgccttgctaaaaggagagaatctttctttttaaagagaacaaatatattaacattttctgaattaatttaccgtatgaaagataatgcaacgatgttttttatagtatctattgtttcagcagttgcatttacagcaattggtacaacagccgcaattggaaatagggatttagtaaggatgacaaatccctatacatttttgtatggaagtcttgaaaatgacaaagtattgaataaaaatctttctattataaaaaagcacctttctgatgctaatattccgtatcgaatggcttcatcttcatatatatacacagaaaatggcgtaaatgtaatgaagttaagtgaatacaacgatcttgctaaagcactaggctatcaacaagaaaaaattgaaaaagaagatgaaattttattaattcctggagtcgtatcacaaaaacaagaatttaaaaatggcgagtataaaaagaatatagaagtcattcaaggtgactggacaaagacatttcatgtgaaaaaagctgtagaaaatttagttttaccacacgattctagaactatttatatcgctgttcaagatcaggtatatgatggaatgcctcttactagtgacccagttaataaagaaattccatatcgtacttacggatttgttgtagatgattggataaaaacgaaagagatttccaatcaattaaagagtatattcgataaagatcttagggacagagatttctactttgaagctttaacattaaacttgttggaagcaaagcaaaagaatggtttattacttatggtaagtattttagtcggaatcgtcttctttacattcgctgctagttttatttatttccgattatatacagatttggatcgcgatcagcagcaatataaaatgatttcgaaaatgggattaagtaaaggtgagttaaaaaaagttgtaacgagacagttattattaatgttctttttaccaattgtcgttgcagtgattcatactgtagtcgcttatatagcattacagcaattagtcgatttttctatcataaatagctctatcgttattttaatttcatttatatgtatacaagttttatatttctttataacccgttggcgttatctgcaaaagctttataaggttatggagcaatagaatttattagcttgtaagactacaataaagtatgtagaaaaatgaactgtatgatgaaaggaaacgagatgaaaagaactttaactatttttatgttaacgatactattattaataagttttagtgcatgttctaaaaaggaaaatccatttcctgcaaacggtgtattaattattggagatgaaaataatatttcaccaattattaatcgttatcaggaaattacggaagaaaatgaagtgttttctgtgaaaaaaggggaagttggaaatggaaatgtcttaattttaaatgaatctacagcacaagcattgattaaagaaaaactttttcgaaaacaagataatggctccaattatattatagatacgttaccgaaattccccaaagaaggggcgctattatttacaagtgaagacaataagactatgaaaagtattaaaataggagaggaagagattcctgttacatacgatagtgatgcttggataggtaacaatcgtaaatattcaacggaatggtatatgattgtagcaaaaaatagtgtttataaagaaataaaggcaaatgaaatgaaaatgcatcttcttcatttgaaaaaatcactaggtgacgaaaaacctaaaatgtcgacagataatacattggttaatgaaaatgtcaaagtaaaaaagttaattaaaggtttggaaggagaagtatcttttcactttgtaacgattggcgaaaaaccttaaaaaagagttcgaagttgataaaaatttcatcagcttcgaactctttttagtttatagacaaatcaattattatgctttacattacttcatttaatcgagtctcactcgtttcttcaatcgcatttgaattttgaactgaattattttgtgcttctttttctttacgagccttttgtagcatttcaagtataatccataaaggaacacctttatcctttaacatcttccataaatctaattcattaaatttatgctcaggctgtttcatttctttttcagatgaacgaatatcaaacttgataggatcatttattttcttactttcaagtttagtagaagagatagtattatgctcaagagtagatgaagttattttagtaggttgagataatgtatgaatatttgatccgatttgcatgctttttcctccttttcaagcaatgagattagttttcttatggtttttaaatctttttaacatgaggcaactatatctaattataaattcaaataaacagatttacaagttgtattgtaaaaagtaaatatttacttgaattaatatttatcaacatttgtatatgttttctatatatacaacgtatataaaatactttacattatgtttaagttgttaaagtattctgttaatttttttaaaaaagaaaaatgtaaacgttttattagggggagaaagtatggggaagttatttttaaaaatatgttttttcgcattagtgaccgtatgttcattcgcagcgaaaatatcatacgctgaagagaggcaacaaaataattatccaatcatattggtgaatggatttgctggatggggtagagaagaaatgcttggcgtaaaatattggggtggtgttcatgatatacaggaagatttgaaacgcaatggttatacggtacataccgcagctgttggacctgtttctagtaactgggatcgtgcatgtgaattgtatgcacaaattagcggtgggacagtagactatggtgccgtacatgctgagaaacatggacataatcgttttggcagaacttatagtggttttgcgccgaattggagtgaaacaaataaagttcatttagttggacatagcatgggtggacaaacgattagaacattagtacagctattaaaagaaggtagttttgaagaaaagaattatgtgaaaaatcacccagacatcaaaatatcaccactatttgaaggcggaaaatcatatgttcatagtgttacaacattagcaacccctcacaacggtacaacacttgcggatggtagtcttctactgccgttcgttaaagatttactcattacagctgcaagctttggaggaaacaataatttatcattatatgattttaaattggatcaatggggtataaagaaaaatgctggagagtcctttttccaatatagtaatcgtattctaaatagttcactttggaaaaatacaaaagatataagtcaatgggatttaagtacagatggtgcaaaggagttaaataattgggtaaagacgcaaccagatgtgtattatttatcctatagtggacatgcatcacaagcagcacctataacaggtttacatttaccgcatattacgatgaataaattgttgatggggaatgcatttttcttaggttcttatgcgagatatgaagaaaaccgtccgttagttgatacttcttggtggcaaaatgatggtgtagtaaatacgaattctatgattgcaccatcttctaatgttgctgtaaataataatgggtcattacagattggaaaatggaatcatatcgaaacgaaagcgaattgggatcatctcgatatggtaggattaagtgtttcagactcattaggtttttctagcattcaagagttttatagaacaattgctgaaaagctatcacgtttaccgaaataggtaataataaagcgctctcgatggaattcgagagcgctttatattatattgaaagagggatttggtagaaaaatatggggggatattatgaaaattcaagttgtattatcaggatacggaacagtaggcagagagtttataaaattattaaatgaaaaatattcatatatatatgaaacatatgggattcaattagttgtaagtggcgtattagggagaaatattgcaatacataatgaagacggcttatcacttcatcatttattgatgtatggtggcggtaccgctgcaattgaaaaatatttagagtatcatccgaaggaacgtgcaacaactagcataagtggtactgtattggtagaatcaacagttacaaatcttaaagatggaaatccagggaaacaatatatgaaacaagcgattgagaaacagatggatatagtagcaatttctaaaggggcgctcgttacaaactggagagaaataaatgaagcagcaagaggcgcaaatgtacgaattcgatatagcggtgcaacagccgctgcattaccgaccctagatatcggacaatttagtttagccggttgcagtattgaaaaaatagaaggaatattaaatggaacaactaattatattcttacgaaaatgtatgaggaagatatgacatttgaagaagcattgaaagaagcacaagataaaggaattgctgagacaaaccctatattagatataagtggttcagatagtgcgtgtaaattgttacttttgacaaacagcttaatggaaacagagaaaacacttactgatatacatataaaaggaatcgagcacgttacaaaacagcaaattagaaatgctaaggaacaacataaaattattaaattaatagcatcaacatataaggatgagggtggcaatgtgaatttaaatgttgaaccgtgcgaaatagaaaaagatcatccgttagcaaaagtaaatgggaccgaaaaaggaattacgttctttacagatacgatgggacaagttactacaattggtggggcttctaatccacgaggcgctgcagctgcagctttaaaagatgtgattaacttatatcgaaaagatttgtaagaccgtaccgccctttataaaaaatacatatgtcgtggaccttttgagaatgaaataaatatgaaaaaatgattgcagggggtaaggaattgtttaaggattttaaagttgttaaagatcgtcccgtttatattcaattgaaagattatttgaagaagatgattatgaaagggcatttgctcggggatcaaaaaatcccatcaacaagggaactaagtgaattactaagtgtgagtagaaacactgtactcgctgcttatgcagatttagaacaagaaggactcatttatgcagttaaaggaaaagggaactttgttgcgaaggtggatatatctaacacttcgtctgttgaaatagattggaaaaataaacttaatacagtgaccgcattagcggatgaattagatttaatgaaacatggtgttcgttgggaaaagggaatgattgtctttaatagtatagccccggatgagaagctatttgatgttgaaaatttcaaaagagcttttcttactcgtatgtccattgaaggagacatcgtattgaactacggatatgcaaagggatatagaccgttaatgaattatttacttcattacatggaaatgaaaggtgtagacatttcgaataaagatattctaattacaaatggatttacagaaggattggatattgtactctcttctttatcaaaaaaatctggtcgtgtcatttgtgagaatccaactcaccacgctgcactaaagctgttccgtttacatggacttgaagttcatgggattgatatgaatgaggatggtattgatacgaataaagttgaaaaaagcttgcgtgaaaaagattttgattttgcttatttaattccttcttatcataatccaaccggtattgttacgagttcagagaaaagaacggaattgatgaggttattctcaaaatacaacgttcctattatagaggacggatttaatgaagaattacgttattcaggttcacatttagctccattattaacttttgcgggagctggcaataatgtcatttatattagtagcttttcaaaggtacttttccctggtttacgtgtaggctggattattgcagataaagagctgattcattatttagaaagcgtaaaaagagcaagaacgattcacacatctacgctagatcaagctgttctgtttcaatatttacatgagggatattttgagaaatatttaaaaaaggcaagatctgtttataagaaaaaatatgagttagctgtcggggcatgtaaccagtacattcatttcaaaagaatgactggagatggtggacttcatttatttatagaactagaagagcatatgaatgcccgcacacttttacaaaagtgttatgagaaaggcgttacgttttcacctggagatgttttttactctgatggagaaggagcgaacactttccgattagggttttcgcgcttgaaagaagaagaaatagttcggggaattaaaataattggtgatacattaaaaaatgaaatttggagttgagaaaatgaaaatcggtgttattatgggcggggtatcgtctgaaaaacaagtttcaattatgacggggaatgaaatgattgctcatttagataaaaataagtatgaaatagttccaattacattaaatgaaaaagtggatttaattgaaaaagcgaaagacattgactttgcgttgctcgcgttacacggaaaatacggagaagatgggacagttcaaggaacactggagagtttagggattccttatagcggaagtaatatgttatctagcagtatatgtatggataaaaatatttcgaaaaagattttacgttatgaaggtgtagaaacaccagattggattgaacttacaaaaatggaggatctaaatcttgatgagttagataagttaggatttccattagtagtaaaaccaaactctggcggatcgagtgtcggagtgaaaatcgtttataataaaaatgaattgatctcaatgctagaaactgtattcgaatgggattctgaagtagtaattgagaagtatataaaaggtgatgaaattacatgttcaattctggatggaaaacagttacctatagtttcaattcgacatgcagccgagttctttgactacaatgcaaaatatgatgatactagtacagttgaggaagtcatcgaacttccagtagaaattaatgaacgtgtaaataaagcgtcacttgcttgttataaagcattaaaatgtagtgtttatgcaagagttgatatgatggtgaaggacggaattccatatgtaatggaaattaatacattaccagggatgacacaatcaagtttattgccaaaaagtgcagaagcggcgggaattagttatagcgaactattagatatgattattgaaacatcattaaaagttagaaaagaagaagggttttaagggaattatataactaattttttgacagtttcacgaagtatgctatgatgaatacattataaaaacaaaatatttatccactaggggggccttttataggctgagatcaaatgtgattttgagactcttagtacctgatctggttaatgccagcgtagggaagtgggaaagacgttgctatttaatgagtaaataaatactgtcgatttcactttctttacgcctgtaaagaaagtttttttattttacagctttaataattgtggataaatacttatattttatacattattggagggatttaaatgactttttcacaatcgttacgtaaagaagtagattcaatttgggaagcgagttttaaccatccttttgtaaaaaaacttggtgaaggaacgttagatttagctagttttcgttattatgtgcttcaagattcatattatttgagccattttgctagagtacaaactttaggagctgcgaaagctcttgaattagagacgacagctcgtatggcacatcatgctcaaaatacatatgaggcagagttatctttacatgagaattttgcgaagaaattagggataacaaaagaagaaaaagataattttattcctgcgccaactgcatatgcgtatacttcacatatgtatcgtgctgggtatgaagggcatttaggagatatcattgcagcaattttaccttgctattggttgtattatgaaattggcgaacgcttaaaagagtgccagccggaagagccaatttataacgaatggatttctgcttatggatctgattggttccgtacgctagttgaagaacaaattacacgtttagatactatcgctgaaaaagtaacagaggcagatcgcaaacgtatgaaacagcattttattattagcagtcaatatgaatattcattttgggaaatggcttatacattagaaaagtggccagtggatacagacgtaaaagacgtaattggataaagaatagaagtaatgttatagctaggtatggatcatacctagctatatattttttcttgtcaaatttgcgtaaagtcattagtgctacggaaatggcgaaatagaatatcgataatttagctcatttacttgtctacgcattaactggataaacttctgtcacatttattttacaatcaaagaacgtaaatgttggtggtatgaagttaaataagaaaagaaacccgagctgttagctgtaacggagttgttttttctttgcaggaatttctaaattatcatggagtgttgttaatacgatatgcaaatatgcatatcgtatttttttgagttctttatgtgttaaaattagatatagagatatggaaatataaagaagcaaaagcaggaataaccaatgaattttgagaggtgttatatgtttacaaataagaaattaattcgatttggtttatcgttgtttgtatttttagggataattaattttacaatcagctatttccaaacatatcttgaaacagcagcagatattaaatgggtaattccagaaatttggaaaactattttgctagatgttcctcaagggatacttgttcttttaggcgcaattgctttatatgatttcacaaaagaggcatcaaaaaaagacgcatcaatctaaatgtgtcttttttcaattagcaatttcatatagagatttgctggagaaatagaatgaaaagccctaattagggcttttttttgttggaatttcttaaccgtcatagaaaccggtcacttggaggtgttatagcgaaagccatttacagtacagaaaaatctaagcagcagacggaaatatataggatatggcatcataattgttgagaaattaattgaacttagtaagtatgaagatatgacgctagaattcatattttttaatttttatttatcccgctatttgccgggcagtaagccccccacctcaaaattcagcggaagcaaagaagttaggtaggggatgaacaaaaccccactgattaaagtttcactttataaaaatgagcccatagtaaaaataggtatatgaacaaggtgcatcatctagtgataagtcatactttgttggtgtacgtattgaacttagtttatagcgctatttctacttagatgtaacgaacaggaatatagggaagtatcgatgaggttgtattttataaacggaggttatgaaaatgaatcagtttcaacaagaactacaagcgttaagccttaatgattaccggtctggaaatattgtctattgggaccagcaaaaccaatatccatattactatattgaagatgctgctcgtcgctgtggcggttgtggtcgttgtggcggttgtggtggaggtcgttgtggcggcttccgttgtggtggcttccgttgtattggttgcttcggttgttttggttgcggaggctgtggcggttgtggcggctgtggtggttgctctaactgttttgatggttttactgatactaccggtactattgtaacgtatgaatattgataacatctatcttgctagttgcgggcagtaacatccccaaaaaaattcagcgagagcaaagagaagttaggtggcggactgcccataaaagcccgattggtgagagctgattaaagtttcactttatcaattaaaaaacattagttatatgtacgtgccgacaaagaatatagccattattaatggatatattcaatcattcaagtgaaagagtaacaataagatatatagatgtaatcaagatgtgatggataaagcaatgactagatttaaaatctaatcattgtttttttcttatggttttatcattaaatatctgtctagtttgggcattgattccttctagctaatgattttattacaaccgtgtaaggttaatgtaatgttaatcgatagtaaaataagttgcttaagtgtattttaaataagattaaaaagtactgtttatctacaaaataatagggtaaatactatgtaattaggaagtgtatgaatatggttgaactaaaatctattttccattcgtataaactaaagagaaaaatagctaaagatttatacggaaaaagagatgaattatcactgttattaaatgaatttaataatatgaaatgtacagtaacatctgaaaagaagaaaaataatatattatctcgtttgcaactaatttatcaaaatatgaaatcggataagcagtaccctctagcagttgcttttgatagtaaattattggagcgattagaaaaagaatctgtacatactattgaggatggtgtaacatgtctacatttaatgttagatatgaattatgagaagataaaacaatatggttcgggtacaagtaggtcattcgttccattatcgcagtcttctatttgtcttgctgattgtatttgtttaacaggatttgtagtaggtttactaggaacaatttcatttggaggattactgttatctatatgttcaattacataacgcttaatatttgtaaagagagcgccgatttaaggtgttcttttttagttttttgtaaattttttgtaaatgataagtacaatacattatataaattgtataatttaaatgtattaaaatataaatataatgaggtgctgtatatgataattacttttaattgttaaaagagtcgatttgataatgttttattcagataaatagtttttacttttcttttaaatacttgatttaaatggattagattaagtaactattgttctagctttttgataatcaagacaactgaagaaaggaaggaatcattttatgaaaaaattaaggctgctaacatttgaaaatatagtagaaccccttttaaatgaaaaggtatcatttatatactttcctattgaatggctggacatcgtagagatacattataagacatttttattaacgagtaagttgaaacgtttgaatgaaagattgtatgatatgttttcagatatattgtttattcagcataatccgtacgtattaaatgaaaatacaccatggattgtatcaaaagaacctattaaacaagagcagctcgattatatttttcaaagttggtatgagattattcatgattggaagccaaatagattagtagaaccaccaaaatatgaatggcaatccgatttgatttctaatttgccagtactacatgataatgaaacgtattctaagtggatacccgctttaatctcacatattttttgtgagcgtcctatatatttagaaaatacaaatgaagaagaattctatttttctcctctgagatcacaaaatatttgtgaggcgatgtcagagccgataaaagatgaaaaaacacaagattttttctcctatgtatatcgatttcaatgcataacccgcggtggtgagaacgctccattattaaatatttcaatagggattcggagattttatcaagaatataatcatccagatattcctttacttttaagacggaaacgaggcatgatattgatttctacctcagagtttgcgtcaaataataaaaaaatacggtttgtaaaactaaaaatacaacaagctacaaccggtatgaaatggattaaaatatttagaaatttaaaagatgattttcaaatagggggagaggtggatttagaccatattctccaatatccgaaagattatattgtaggggaaaataaaagggtgttatttccatacaatgagagaatttataaagttcaaggtactaaaatagaaccgggtataaaagtaaaggaaagagagtatttatttaaagaatttcagcgtaaattctcttatttcacaatacttccagaatgtaaaaaggtagcaacaaataacaaaaatgaattatttcctttatttgcaccaaaaggattagagacattaacattagaggtttggtctgaaaatatagtgctggaaatagaacaagcattacttgatagtgaaattattttgactaaagttggtgaaaatacttacgtattgaatacagattttccagtgttattaaaggttgtgagatacaatattgaaaaggtgttacaaaatccatataaaatgcaatattgccaaaaatataaaacaaatcttgtagatgatgttacgaaagctgtctatgctaccgcgggcgagcgcagtgatgcgacattagcattaatcgcattgaaaaattgtgatggacgagaaaaaattgatccaaaacaaatcattagagagggatttgcacgagcaaaccgtatttcaacatttattaatttatttataggccaaagtgtatcgcgtaaaacaattgtaaatagtgtttttagtttattagagcaaaaaggatttttgaagcgtagttggaataagataaatttaccttgtatatatgttaatttatcaattgaacgaatatcgaaatttgatttcttacctattctttcaaaaataaaaggaaaagaaattttatataaattatatgggaatacagaatggcaaacgattgattacgtattattaaatataaataaacataatgcatttttaccacaaccatcaaagagaaatgatatgggagctctttttaaacaatatgtttccgaaacattaatggaaattgtacaatatgcaaaagaacaaaatgaacaagtttacttcattgtagatgcaaatttgagaaggtattggataaaaaagttacaaaataaagaaattaatacagatattttacctgatattgttccagaggtgttaaaggttccaaatttaaatattattagaataaatacaggttttgatgtaccaagttacggtgtaatagaatgtgatgatgctctagatagcattggcttatatgcagatcaaaaagggatgtattatagcactggtgaatattcacttaattgtagtgggatttttcagcgatatatacttgaaattctaccattaggtgtaaaacctgtagaaagggattatatcgctaaaatgatacattacatgtgctgtaattctagtatgctttcgaaaaagaatgtacacatgacatattccatgcatatggaaaaggtaataaagagttatattactgacatagatgcaagagagtttaaagaatttgatgatgaattggatgtagatgtagtaaaagtagaaaagaaagattcaattattctactttaaatactagtaaacaaatcctgctcgttatatcgatcaggatttgtcattttttcatgtaaataaggatatcctttgtcaagtatcttttcgtttacatatttactttatgtgcagacaggattaatatgttttttagaaatacaaaaactatttcatatggaaaaacgatttttattaattgaaaaaatttgaaaggaatggggaattgtgaagaaattagatgtgctcttaatgctactgagcggcctctttccaattgcaggacttacaaagcaaatccctctagaacaatctatatatattggagggcttttattttttactagtttcggtagttattttgctaaaaagatgtattcacgtatatgcagttggatagcgtatgcgccatttataacattactgttagttatttggcatcaagatatttcaacaagctcaatcatagcaaatgcgaaaattgctgcatgtgtcgcgttaattccatgtttattccgttttcgtacatatggacttactttgggcttattctcattatgggccgctttactatgggatataaaagaagtacagtcgttagtcatacttgaacgcataacgagtttaatgacaagccattatgtatatatattactattaattggaggacttgtaataggaggattacttgcgatgttcattcaccgcaaagagaaagataataataaagaaaatataaatctacttggaccaaaaaagaaacgcaaaagattatcatttaagattcgtcttccaagattaccgaaattaaagatgaaactatttaagtttggtgggaaagaatctaaaagtaaaatgccagaaaaaatccatgaatataagtacgaagaaccagttgcaacgtatgaaatgacagagaaaatagatccatacaaagaaaatgcagttcaaggtcaaacaaggatggaacgccgaagaaataggtataatgcataatgaagtttaataaccccgtaatgacttatcttaatattgataaatcattacggtttttttatgtaataaaatgaaggttgctattgcggaggggaatagcatattttatagataggaactaaaataaggggaggataaaatgcttatcattacatatatatctgcttgcatattattcttagttagctttttacatgtatattgggctttcggaggtaattgggggacaaatagtgttattccaactaaatcaggggaaaaggcgtttacacctcgcgcccgaatgacattgttcattgcattattattaagtatggcagcaataattttgttgcaacaagcaaatattgttcattttgcagttcctaatgttattattcaagtcggttcctggatttgtatgattgtcttttctattagagtgattggtgagtttaactattttggtatctttaaacgacaaaaagatacgcactttgcaagaatggataccggtttatatattccactttgtgcatttttatctttatctttcctattagcgataattttgtgagtgaataatagtagtttcttttctcaacatatatgtaaacgtgagaaatctaagagtaaataaaaaggatgtaagcgccttcttgtcgaaatgtaaattattatgaaagaccaactatgagaagtcaaggggagttttttatataaatagggggtgttttccgtaagggttagtagctaccccagccctctcgggctaggatgctacacatttgtgcgcccgttcaaagagttccctgcacaatctcgtaaatataaagtcattctgacaattgcaagtcaaacactatctcaattagctttggatttcacagagcagtatatgtttactttactaggttcgttccgtaacaagatgatatttggtgatgtaacaccatatgatgcgaaaattttctctgacatgtttggtgaaacagaggaatttaaagaatccgaatccgaacaagggatttctcctatgcaagagaatcccgttagtcgcttaggttcgacatatcaaaaattaaaagaagtcgttatgtcaccaggagatattatggcacaaggtgccttcatttgtgctgcgcgtattgtacaagacaatcatgtgcaacctgtacaacaaattactagtaactttgtacccaaagaggaatttactcaagcaatcattcaagtagagatcaagtctggacaatattgggaaactgaacgtcttcgactcattgaagaatctatcgcaaaatcaaatcctatgaaacatgtagatgcaaataataaaaaacagatagaatcatttccacctatgcatggtgataaaatagaacaaaataattccatagaaacaaacactgtagaaaatgtaacttttcctgattattttaaggatgtcagtcaacagggaaatgttattgaagaaactgaaaataagttgtatgaagaaattaaggcattcgttattgaatcacaacaaatctcaccatctcttttgcaaagaaaattcagaatcagccatataaaggctgtaaaatttattgagaagttagaacacaatcacattgtgagcacttacaccgggaatagccctcgtaaagttttaatttcaaacaataataatacgttgatattatcaaaggattctcaaatcaatactactccttcatctaatacagatttagataatacgacttcacgagaaaatagcattccaaacgaaaaatcagaagcaaagcaagaggaaacaggcttctttaaagacatcctatatgatgatgtagtagcctttgttaaggcatcagggaattcttctatacatgcactacagaacgcatttaaaattgattatacacgtgcttcaagattacaagatgccctacaacggaatggcgagctgccgaatataacaaaagagacacatagggaaatagtaggtcctaaaaaaaatatggagctagcagaacggaagaaagaggtatctaatactatgctggaaccaaaaagggatatagattacccaattcatttaggaattcctgtagaaactgatccattgcaaaaaaagcttctaacagagggacttataaccacagtattagaggaaacaaaaacagatatgaaaactaatttgaaaccagctacaaaaacagttaatcccactaaagaaaataaacttgatgaagaggttgcaaaagtttacgaatctattagcattactgttcatcaaaacttagaaaagaatatggtagagaacactagaaataatgaagagcagcatgaagataaacatatcgactataaagaacgcaaaaaaaacttaaaagccaaacaaaagaatacgtataacaatacaaattcactacttaataaaaaccagcaacaaaagaaaaatacatctaatgtaatgagtaaggaattagatgatttttttgattaatacctatagaaacctaaaataactttttattcaagattatatttttagggaaaatctaacttaaattaggaggaaaggttagatatagtattttaacttttcccttttcaaaaaataatacttgcacaaattacataaaaacgttatattttaattaataattatacaaataaaacatgacttacgtgaaggacacaccttacgtaccattccaacggtacaggtgtgtccttttttacgttcaaggaggaaaatataatggttgaagataaggtaaatactcatattacaaaagaactagggatggcatttgaaccggataacacgctagaggacatctttatagaatcaactttcaatcaatttgaaagaatacgtgaacatgaattagaagaattagctcgtatgaaacgtgaacgtactgtagggaaaggcttaattacaatagtatctgaaaaattattcccaactaaaaacgggacatctgagcggatacaagtgctcacaatgcaaattggtactcatacgacagcatattgtccacttacagaggcaggtataaatattcctaaaaatcctcaatggctgataggtaaaacaaaacccgttattattgagcatttccaaagaactgaggaagggaactttgctgttgtatctatcactgcaggagaacttgcactgcaaagaaaattatatgaagaaatagtagagcaagaggggaataaagtatacacaggaacagtttctggacatattccatctgcacaaactattctggttgaagttcatggtgtaacagtaggagtaagatactcgcaatggtctcattcattcgttcgttcggcggatattattattggcgatgttgtagagcttatcatcgataaagtagtggaaaaggatgggcgctatgagtttagaggaaataaaaagaaacttgaaacggatccaatggaaaaactattagaattaaacaaacgacgtgaccgctttgtaggtaaaattgtaggtgtagatgctattgctgggattttcgtagaagttgcaccaggtattcaatttaaagggttaaagggtcgtaatctggcaaatccaaccgtggatgacgcaataaaccaaacaattgttacatgtgagctgcttaatattgatgctaaaaatagaagaggaactgtacgtattctaaattatccgcaaggccaaagtaaaaaatctaattcgtcaatttaccaattttaatagatgattatgcgtacaataaagaaacaaatgtctacttatattccttctattcctcatttatcaagtgaggatgtacaaggacttcaaatatatcggatacatgacttggataaaacctatgtattccactcttatgacgaattagttaagtttaagcagcttttaacagaggaacaatatgctatactcaatttcattggtgttcatacatctgttcggtttaatcatttattatatctattcaagaataaattttcacggaagaaaattaataatgcacttcaaggattactttactatcaatttatagaaaaatggcaagtagaaatttttgatatggaaatctttgaagaaacatataccttatccaataatggatttaaactactaaaatactggcaagggaatatgttcttctttgcaccagagcgtcttgacaatcatggtaaatatgttcacctacgttattggcatgacatagacctactttgtcatttacgctacgctccttcatttttaggtcatattatgcatccatctattagtaaaggggtttttaccccttctttaagttttatagtaaatggaggaaaagaacgtaaatttaactttgttgtatactccaccttattatctgatcaaaaggatcgattaaaacgaataattgctagatggcagacttttgtagagtcaggaaaagatgttattatgcaggacttagggaataaccctacaatcttagttatttatgtttctactaaaaaacaagcaaagaaaattaataatgaactattacttgatttaattcctggtaaagtattgttatgcataggggaatctttacattttcaaggattacaacacgctttttatcaacctcttgcagaaggggagattaaacaattagatacaaagctatttaaagaaaactaatccaccttacaagctttcgcttcaagggtggcttgtttattttataattagcttgaaatattcaaaaaaacttaacaaaattaataatcctgtatctacctctatacaaagcaaggattttgcgaaataatattctttgacacctgttaataaaataacattatatacaaatatagttatttcattggaggaatatacaagaaaggagtactatattgctacgtatacaaagagggtacatgtacgatcctgataataatgaggtaatagtaaatgaaattttctatgatggtacatcagaaaaaaagttaggcagtaaaatggggatatttgatccagttaaagtacctattgctatttttgaaaaggtccaggaaaacgaaagtatgacctatatggaaaatgttgaagtagaagaaaaaaatattaaggaaatactttgttatttagttcaaaatcaaaagcccgaaaaactatattttgaaatacagtacatgaagtaacaccagggcctgaatataagaggggatttatagcaggggaatcaggggcattattatacaatacatgtgggatctgcatataaacttccttcttatctctgttctattgaaaacaattgaatataatataaaaatggtttaatataaatctatatttattgtttaattgattccgtctattcccacgccctatgtgttgtggttgagttttagaaacaagttatatttttgtttcaattatgaaagggcttctttgagccgattagtgtatatatagcttattttgctatgcacattttaatcgacttgaagaagtcctttttgtgttgtcttcaagttaggaatcacttatacataaacctttaggactaaaagtatgctaaatgagaaagtacaaattttgtgctttttgtttaatttaggggagagattatatgaatttttacagagtatagcataaaaaaatatggataaaacgcacatatttcgtgctttttatttagaaaagaggatatttatgatgaaatatgaacatgcaattactttagataagccaacattatcaataggggaaatcatttaaaactttcaaaagaaaaattaattaacacgttaaatgttatgaacttactatctataaaatcaaacctttatattattgtaaatcccaaaatttaactattaggtaaggtaataagaatcaattcatactgacattcgaaagagaagaacaagggaatctaaatatgtaaagtacttgttgcaatgctaaaagcacaaggaattagaatatgaaacttgagaggagttatataatatgattacagttaatcgaggatacatgtatgatccagatgataatgaagtcttaattaccgaaatttattatgaagctgctacagatactaaactaggaagtaaaatgaataacttatcttactcatccattcctaatgagattaaagaaaaaatagaagcaactgcttcattatcctatgtggaaagcattgagatgtctcagccattagctgtcgtatatcaaaatgaaattaacatgtatggaaaaccagaaaaattatactttgagtatacaaacatttaaaaagaaaaaagacattgaacagttggtttcaatgtcttttttccttttaaactatagagaaacaaatggttaaggctttgtttggcatcctatagtgttttaggtgtgttatacttatatttataaattgtaatattacgtagaatgttaggtttgtttgctactattcaatatatataactggagggaaaattatggttttttttaaaaaggcagtatgtggtgtttgtgatataaaggttggtttaaatcgttataaaatactaaaatctgacgcatggctatgcccagattgctttcataaagcaggtggcttgggtgttgtaagtgtaagtacggacactatcgaagaattgaaagctacaatcgatgcaaaggtagcaaaacttgctgaggatccattgtcatgcgctgaaggaatgtatcaattctgtatagataatacattcggttctggctttaatgaaaagtggggtgtaaaacacttcaaggtattagaagataacttgatgaatggcgaaaaaatacatatgacttatatcggaatgcacgattatcaatctacaacaaagcatgatggttattatgcctacgccataagtaataaacgcattatgttcggacaaaaaacaatgactggggaaaaattcaaagcagtagatcatgaaaagataaatgatatatcttttgaaatagggatgtggttaggctttctaacaattgatactccgcaagaaaagatcaaagttgcgttagataaagattcagcaaaatccattaataatcatatccatcaagttctagatgctttaaaaagcaaacctactgaagctcaaccacaagcagtatctgctccaatatcaacagcagacgaattaaagaaattcaaagagctatgcgatataggggttattacagaagatgagtttaacgccaaaaagaagcagttacttggtatataaatacaagataaacaaggcaagtatattagagggaaaaagacattaaacgtatttgttcaatgtcttttttattacactgcagagaagcatgtataataaatattgtaaatgaaatagaaactgcaccctatacgaattattgactaacctagagtttctttttagatgacagtttattaaatttttagcgataaaagccaataatttaaaattgagacatcctatttcttataatctgactaataatttttgttacctaggacaaggataccaaggtgctgaggaggtactaagaaaagtacgaattttcccaaagttatcataaatattgcgtggaatagtccacgtgtgcgtgacagtatagttctttaacctagaatcaggtgatacaatatcccgccattcagtaaggaaccctccatctttggttaaataaagaatcttaaaaaccggattccacactacttcccccaagagggtcctgttgttatttaggatgtatgaaaaactaacttgactactcttatcagaatttagcataactgtaccagtaacgttagatatagacataaaaacatcgcttttatccccagtactactgttgaatacaatccagcctggggcaaagtatattttagttaagcggatattatccaattcagcaatttttaagactgtgtcttttggttcaaatcccataaaatatcccctctcatccaaaaatatattcattgtatgaatgtatttttgtcctagtaaattggatttaactatttttaaaaattaggtagtattactactttacttaaatctaaaatacataagttgtcatgaacgaattattattttgaaggagatgaaatattaatgcatatagttccgtgttgtcatctacaggtatatacatcatttacaccaaatcctatgcagtatattccatatgggtcatggaatacttttgtacagctcaacccgcaaccactacctcctggtacttttgtagaactcaatccacagccactacctccaagatatcattattaaaaacaaaggctttctaaaaaacttaaattgcggagtacatctaaagaccactggaaaggtaatctttagatgtatttacatacagaacattgcttcatatacaactacagaggaacaaagcattctattacaagtaacccctaatttaactttcacttacctttggactttcgtccttcatcaagttaaggaataaggtatctgtgatgatgggttctaacaagacttcaagaaggtttacaaatgttattaagcattgaaggacgttgggaaataagggcacaatatgaaaataaatatgtaatagtaaggagaagagaagcgcatatataatatacttaaacgtcaatataattctattttccaaggggtgatttggattaacgaggaagtacaaagagagctaaacctattagtacaaaaaatttgtgagaccgtgtcttctgtccaaaaaattatcctttttggctctcatgcttatggtacaccaaataaagatcgtgattttgatctttgtattattgtggatggtgtaggaacaagaaaaagagaagtgattaatcttatcaattggggtatttacgatgtgatggaaacaccagttgatattttagtatatggacctgaagagtttcaagaacgtgctaaccgtaatgtaaccatggaatacaaaattgcactaggggggcaagttttatatgaaaaatactgaggatctagaagagttgctattcattgcaaaatctaatttagattctgctaggtacttaactcacatgaaacctttccctgcctcagttatttgttaccatagtcaacaatgtgttgggaaacctctaaaaggatttcttacactaaacattagaacagcccctaaaactcataaccttttaatgctgcacaaattttgtcgtaaattagatgaggagttctcattgattttagaacaatacgtgcagctgaatggttatgttacaaacattcgttatccgtattttgaagcacttactgtccaagatggattaatggctcaacatgctcaaaaagtaatgagtttctataatgaaaaattaaacaagctaaatatacatgaaattgtgattgattaaaaatagaggatatgcataagagagggttcctatagcaagggactctctttttctatgtaaaaaagaaggggcaagttttataatgatgaatacttatagagaaattaaagaggaaatgaaaaaagtcaatttatctcgagattgttgttttgtaggttaaagtggggaaaagatagtccgttgtcactattatgtaatacaattgctgagattctgctagagaaccgtacaaaacctattgatatcttggcttcctaggttggagtagaaacacttctatgattgctgatatctcactgacattacaaaatatctaggctaatacagatatataagcagctaatcgcttgtttatacacttctaaacctctcgtgataacagtaattaagagccttgcctaataagacaaacaatgaatgtatttcgcatttgctgcgccaagatatgtctattcaacccttcacgttttaattcaagtcgtatcatcttttgtattgcaacctcagacaaagcctttggcgcatctttttcgtaaactcaacgatatgttccctgattaaaattaaatgctataaacaaaggattatctgtataccgtctaagccttacatgttcaggaatagttatatagtatttgtaaagatgctttgtatcttccttggttaaggaaacagacctagttacaccattttctcctggaacaattaaagagcaagctgtatatggctcatattaagcgatacaagcccttgtaaggacaacccatagtttactactaaatttattatagaagcgtttctatccataataagagggcgatattcaacgtgtctttctgttaatccttttgttgaaagggtagtttgttttaatagtttttcttctgcttcggtaataaaatccttatcacttagtgattgatcaggaatttatgaggggtgaaaatcatctactgaagtatctatcgctaaagacatgttcaatttatttaagaacggccatattctgtgccttgttttctagcgcatagaaatactcctaataattttctttaggtagttcacttcatgatttgatatctaggagcttctcatttgctcttagtcacttataaaaaccagtaatatcgtaattataacgttcaatcctagattgtttacgtccattttctgctaaataaacagaaaacgattctaatgctacttctatactaatacccttgttctttataatcacctaaattcttatcatatattataacaaaaaataagtgaaagacctgctaccgccctttgctgcgctcggttgctggcatataaaaaaggaaaacggacaaacaacccttttccttttttatatgttgttttttattttcaatgacaaaaagacaaatctagtcctaataaggattcatagatttgtccttttacatgggagtaatgatatgtttaattaccattattataacggtttttacaaatattttcaattaggtctgacatcttattaataatcatattagtaattgtaaaatctattataaatatatatcttatatattaaaaagaaataaagataaaactattataggttatcaaaaatagggggaaactctactcccacaagggaaaatttgatgttagcacgtaaaaaatcataaatagtaaaaaatgtatccgtagattcaataattataagactttcaattctacaaaaaagcaaaaagaaaatcatatgtttctacatgaaatcggaaagaaattgatacaaattactttatatttattcaactatggaaataagcttcatttactttattttggtaaataagcagtatttaacgttcaattatccacattttgttcagaaaatgtagttatttgttaacattactcagtatttacacataactcacattattattgatgatttttattagatatatacaacaacactagtagttacaatgatgtcagaaaaatactattcacattcgagtatatttgtcctcatatccactgtttttataattttatttttgattttttgtaggtattatgaggtatgttttattacattagaagaatactccctggcactatgtggagagttatatagtgctagaagagaatttgtatagaagtgcataaaaaaagacttcattttacatgaagtccttctgattttgtatttataaatagagtagtagaaaaagagtatgaatgaaacaactacgaatagccctctaatttcgattttttcaaaaatagagagctcgttactattattttatttccattgcgtgtagcacctgatctggagctgttattgttacaccagcacgtactaagcgttcgaaggtacgcataaactctagtaaattaaactgttttggtagctcaatcacacgcagttgttcttgtggtagtttatcaattgtttcaataaaccattcacgtacatcacttggaattgtgcgttctttatgaccacgaacttttagtttttcacgcatttcaatttctaaagcgatatatgcatggagattcactccctgatcatatgcatattttctaaataacgtttcttcctggtattttatataattacggtgataagattcttctgttactggtaccgcaaacttctgcttcaataatgcatgcacatttttaaacatctttttaatgttacgaagagagtacatagaataatgtaggccgaaattaaagatagcttgctcacgttcgctatttctctcttttggtatatgctgcgcaataagagggtagataccttctttagctgctgtatcgagaatttgatattgagatgtttgatgcaatagtttcttcaatgtatatacaattttcgttggatatccttcttttcgatcaaccatgtcacgtagtccgcgaatgacactgcgaatttgacggtgacaagtatgctttaagacatgaatgaatttattcatgtctgcagacagttcaccgatattcatctcttgtaggactgcttcgataaatttcgcttttcgagcataggtagcttttggtgtaaatggatccctatgttgttcttctccagcttctttcgaacataagaagtctgaatgtatagacagatataatgttgtatatcgttttgtatgctttacacctttttgcattttgcaaattttgaataggggattccccgtacatggtaatgcagttgttaattcctcgataaccgcacggatctgatgcggatattttttatgtaagaaacgatacatcccaccgaagtgagttttgtttcctctttcgtcctgcttgtctaaagaacgctttaatgttgtttccgtatgttgttgcattgcgatgtctaagaatagtttcttagctgctacagatagcttaaagaaatcctttgtaaatacaacaggactaatatatacgtacggatttgctttttctgtttcctcattcataaaatgagtgagtttgattgtataacggccatctactccattttcgatggagataatgttatgtaagtttaatttctttaatgcgatatagaattgagagtgttggatataagcaaattcttctttatattgcttgtaatcttcccacatcatatgtatggttacatttggaatgacgccgtttgtatagcattttttatgtaagtacaagaacacttcaagatcagcattcgtaataccgtataatttatgttttcgtcctgctttttctgcaagtgtagacattgcccgacgtgaaaaagatggtttggctttttcaacaaaaccttctacatccgcaatacgctcttcgtatgtcatgtgctgcaaaatatcttctaaatatgtatctttatagctgtagtatttctcctcaaatgtttccacaaacttttgccaagatttgagtgttactaaaactgcgtttgttgttttcccatttaagctacgttgattacgtatcacaaatgattttcccatctttttcacctccgttctacaaattcagaaatatatgtcaaaatactataaaatataccaattttgattatagcaaatcgaaaaatgatgaaaggtgctcctttaagaagaaaattagcaacttgcaacagcttatgaagctagttgtatcaagggataagagaatttcatgatttttttttgtgttaaggataccgcaaacgtgttgcaagttgtgtgatatgtataaaagtaagtgaaaaagcacctaaacccttggtatataaaggattatagtgaaaatggtaggggagttagggaaaggataccgcaaacatgttgcaagttagtgaacgtaatgattaaaaatgaattgtaataattacccttgatataaaaggacttgttgacatttatagaatgaaagtagggaaaggataccgcaaacactgttgcatcttgtgagaaaaataagggcatgcataccgcaaacgtgttgcaagttggatgatatgtataaaagtaaatggaaaagcacctaaacccttggtatataaaggtttatggtgaagatgatagaaaagttagggaaaggataccgcaaacatgttgcatattatgtatgtaacttataaaaaatatgagaaaaatagcttgaaaactttaaaatgacatgattttttttagaattacttagttgagaaataaattatactgttgcaagttgaaagagatagggaaagaataccgcaaacgtgttgcaagttgattagaaataggtaagagaaagagcaaacgtgttgcaagttgagaaatataaggcaaacaaagcgcaaaaagaatgtaagtaaggagaaagaggtaagaaaaaaagcaacctgttgcaagttgaagagttaaggaaagcaaggcgcaaaagaaatgtaagaagaagaaatagggaaaagaaagagcagcatgttgcaagttaaagagttaaggaaagcaaagcgcaaaaaggatgtcagtaaaggaaaataggtaagaggaagaacaacctgttgcaagttgaagagttaaggaaagcaaggcgcaaaagaaatgtaagaagaagaaatagggaaaagaaagagcagcatgttgcaagttaaagagttaaggaaagcaaagcgcaaaaaggatgtcagtaaaggaaaataggtaagaggaagaacaacctgttgcaagttaaagagttaaggcaaacaaagcgcaaaaggaatgtaagtaagaagaaataggtaagaggaagagcaacctgttgcaagttgaagagttaaggaaagcaaagcgcaaaagaaatgcaagtaggtagaaataaggaagagaaggagcaacctgttgcaagttgaagagttaaggaaagcaaagcgcaaaagaaatgtaggaagaagaaatagggaaaagaaagagcagtatgttgcaagttgaggagttaaggaaagcaaggcgcaaaagaaatgtaggaagaagaaatagggaaaagaaagagcagcatgttgcaagttcagaaaagaaagttgcaaaaggaatgcaagaaaagcagaatagagaagaaagaaacaaaaatttgtaaatatctgttacaataaattaaatataatagtagttaagatttttatactgagaattatttaattgtgatccatggtttagggaggaaaagaaagtggataacttattacaaatgtttcgagatgcattgttaatctctgagccaatttataaaactaacgagctagtatggaataagtggaatgcatattttaaagatgttgaaaacaataataataaagtactcacatcacctcatgcttccccatcatttactgcattagtgtcttggctagagaaaaaacaagaatccggtactacattagtacaaatttatgccaaaattgattcctataaggaagaaatatataaagaaattgaaggatttatagacaaagaattccaaaatatagcttcttcaagttccataatagtagaaaatgatcaaaatatagaagagacaagtatagtaaaccatgaggattattatgaggtaaataactctgctgtttattataagctaagagatgggattgcaaaaaatcaatttgaagaagatgaactgagtaaggttttacaatatcctattgaaacaaaatcttctaatggtgtagcccagctttcttcacacaaagatgaagatttaagacttactaatatagaagaagcagctcgatggaatactcttgttgatgatgtaatgagtaatatggatgatttaacggcagattgtttagatgcaattacaatacaatggataaacgaagcaaaatctccagacgaattcattgatttttcttatgagcaagttttagagatgtgcaacattccaaaaacagtagtcaaaaataaggaatactatagagcggaagataaaattaaaatagcaaaaagaattgcagctttagcaagtatttttatctatttaaatgatgagaatgaagtcgtagtattaaatgaccgtgaagatgaaggggaacgactagaattaaagcgtgaggttgttaaacgattatttgtattagattcggttgtattgtggagacatagtgttacaaatgaatatatgggtattgaatcttgtcgtattaagccaggcagctttttaaccaattatttatacggatcaaataatacaacagcattattgtctaaaaaagcacttgaatacaatagttatagacacaaatatcataaaaggttaatacgatacttaacatggcaatggagaattagacaaatgtattcatcattgaaaaagccatattctataggtggggacaaaggcctgctagcagtaatggatatcccgaaagattggaagcctaatcgtattagagaacagttagaaaacgttctaatggatttagaaaatgaaaaagtaatctctcattgggagtatagtgatccactggatgaacaacaaattgggaaacgtaattggtttaaaaattattacactaacttaggaataacgattttgccacctgaagaaatgttacagtcaatggatagggtaataggaaagaagagtatagaggaaccacaagagcagttaccggaagtaacagttgttaaagaaataaagaagactgtagaatcagtcgaacaaatagagaaaaagatccgtgacaaaatactgaaagtacacaatgaaaaaaaggtaagcattcgtgaaatagcagatgaaatgagtatttctccgtctacattatctaggttttgtaattataaaacaaaacgtttatctaaaaaagcattagaaaagctaacaaaatggtgtgaaaggcaagaaatattagaaaagatgtaacatagactaaatatttcttttaataatagtcaaagtaaaatacacatacattatgtatgtgtattttacttattattaccaataatagtctgaattttctttattgatggtggttttggcgggcgaagatcctactggaaagtcattatagttatgctgtttaatccactgcaattaaatttcttgtcttatcgatatggttcagtaacatacgatattcttcttcatacatattgatacgttgtagaagagattgattctctgtttttaaatcttcaatttgattttgtaattttgtcaattcattcacatctttataattttgtagaaagagaataatatcatctaatgtaatagacaaagagtttttttctttttctgatggggagaggggaatgttgtttcccatttttcggtcttgttttgctagttgtatttcttcttggtattgttttctcacatatgaattccaacgaaatccacaagctgcgggtgttctagctagtagttttgctacttctttgaatgcagctaactgtgttccaccgttacgaatattctgaagtactgttgatgcgagaagtaaatcgttatcatcagtccaggaatcttgtcttgagattaccacgttttaaccccccttatatgttttatattatatatatgcaattactcaaaatgatagaagttcaacttctcttgaaataattgggagtaagttggtagaagtatgtatgattttaaatgcaaaattgcatttaaggttgactatttcacgaggtgtaactatactggttacagtaatgcgactgaattaataaagttgttggtatgaattggttgtattaatgatgtataaacaaatattaaagaatgaatggagttgaaaatatagttctacatataaaacgtttgtataaaaagaaattaggtaatatacatttttttataactatatactaataagaagaggtgcatgttttgaaaatttttaagggaattttagtttcttcaattgcattaacagcatttaatggagtaggcagtatacttccaagtgaaaaatcagaagttgcctacgcagctacttataattattcaaataagcaattgaattctactgtacataagcaagttactaaacaattaattttaaaatttaaaaatgaagtgaatttaccatatcaggatggaatagaaaaattcattaaagaagaaaaacaagatcctgaattaattagaattttagctgaatatccaaatgtaactataaatcgactttttaattctttaaatcctaaagaaattaaaaatctaggtaaagaaataaaagattccgatcatatttcttctaatttgctaaactattatattgtagaaactcaagatgatattgatgtacaagcattacttacaaaatttgaaaaatcatctcttgttgaaacggcgtatttacaggaagaagaggcgccaccagcagagcgtttgccaaacttatctgttaatccatatgatgagcctagacttacaagacaaggttaccttgaaccagcaccattaggaattaatgcaccttatgcctggagcataaaaggtggagatggaaaaggaactactttcgtagatatggagtatgggtggttatttaatcatgaggatttagtgaatcaaaagattgaactgatatctggacagaataaaagcgagcaccatgatcatggtacctcagtcttaggaattgtttcggcagaggataataatataggtggaattgggatcgcaccgaaagctaaggtaaaggttgtatctcagattagggataacggaaattataatacagctgatgctattttaagtgcggttaacaatatgcaagctggagatattcttttactagaggcacaagcaacttacgatggatatggagataagaactattttcctgtggaagtaaaaccagacatatttgatgcaattcgtatgggaacaaataagggaattattattattgaagcaggtgcaaatggcggaaatgacttggatcaatttagagaccgtaatggtaaacaagttttaaatcgtaatagtcctgattttaaagattcaggggcaattatggttggggcagcttctgcaagggttcctcataagcgttcatatttctctaattacggtagtagagtggatgtgtatggatgggggaatgcagtagatactacagatgctaaaccaagtgaatttataacaaatttatatacatctagttttgctggaacatctagcgcatcacctattattgctggtgctgcagcatcaattcaaggaatagcaaaaaataatcaggggagagtatatacaccaagtcaacttagggatattttaagtgattctagcaccggaacgaaatcaaatgatccaacttctgataaaattggtgttttacctgacttaaaagctattttatctaaacttggtttttcaccaaacttaggtaatgattcttccattgtatttcctgaggaacaagaaataaataaaggaaataagggaaatgaaggatctactattacattcccgaaagaagataccgctaatagtggagaggactctagctttattttcccagaataatagaaatacctcctattaagcatggggcaaaatagtttactcaataagaacaaaggatatgaattcaatagaaatatgaatttatatcctttttattttaagctgtttttactaccttacaaaaacgtaatgttagcgtaatggaaatgaattttggcagccaatagattaggatataatttttgtgagaaaagatatgaggtgaataatatgaaacgaatagtgcttatgtgtagcttttttgtgatgtttactgtgttgttatccgggtgtaatttaaatcgtcttggtacagatacatattatgtgcaaattaccaaggatggtgaaaaattaaaagagaaaaatgtaaatggggatacgacttacgaatataaattacctggatttgataaggatggtaaagagaaagaaatggagtttacagcgttaaaaaaccttcgtaaagaagcgtttttacgtatatattactctgagaaaaaaggtgtgaaatcttgggaagaagtgaaaaaaggtgaactccctacaaaggtaaaagaaaaattaaaggtggattaatatataattctttatcattttagccaagaagactccttcctcaaggagcgtgaagggtcacagtccagtgagtaggtgggagatgaattgggtttgaacaagggatggcgggaagccatcttaattgttcgacatatagaaagtattactccactatctatcgaatgtacgtttggtgtataatggtcatataccgaaatggaggtgaatcaaataatgatgaataaagcctataagtttcgtatctatccaaatcaagcacaagcaattctaattaacaaaacgattgggtgttctcgttttgtattcaattatttcctatccttatgggatcatgcatacaaagagacaggaaaaggcttgacctatggtacatgctctgccaaactacctgccatgaagaaagagcttgtttggctaaaagaagtggatagtattgcgattcagtcgtccgttcgcaaccttgcggatgcttatacgcgcttttttaaaaaacaaaatagcgcaccgcgctttaaatctaagaagaacaacttacaatcttataccacaaaacaaacaaatgaaaacattgccattatagggaataaaataaagttgccgaaactaggccttgttcgatttgccaaaagtcgtgaagtagagggacgtattgtaaatgctacagttagacggaacccttctggtagatattttgtgtcacgattttgtacatgcttaaacaagcgaaaatgtacatgtttatcttgacatttacaaagagatgaatatatttgaattttattaattaaatccagaaaaaaatatcagaatagaaaatgctttaaggcctatttgcagttgaatatttatggtatgaatattgccgtatttcttagtatgctaaaaatacaagcctgtaaatcactttgttatgactgtaaagtaaaagaaggatattgaactattttattatttataaggtattatatatactttgagattcagaaggtttgaataagttacgctttatatgccgatattttggttcaactagagtatcaaatgtggaatatttctttgctatataaaacctttacttcttaatcttatataagcacaaagtaaaacataaggggatttttgaaaaaagagtattatggtctagtataaaacttgtattttagaactttaaatatattaagataattcaaaggggaaaataaaatccaataatcattaagatggtagtttctttggattcgtttcttaaaatatctatttttgattttccttatctattttgtaataaaacttttcattaatagatgaaaatatgtatgctttattaggaaataattaaggtatcttttaattatctataattatttgttatagaggaattagataattgaagttcttttcatttgggaatacggtgataaaaaaggagggacggagttataaggatcaataagaatacataattaaattgttttacaataaaacattccattctcattaatattcttataatcacaaaaaccaaatgctataaaatggattgtttgaaaaagttgtgaatatgcatatttttggatgcgtgtacaattataatcatcatgatatcacttctcttttaagaatgcgaagttttgtcgttatgtaaacatgggtgctcaaaactttacattttttgtacaatataaaatattaaaatacagttgtacagataattgatatttctttatatgaaaaaatgcttataaatactatgcaaagctaacgtataattttttagaccttatagaatcaaataagaataaagatagaaaataaaattgaaatactaaggctagcaaagtaacgtgaggtaatagcatctattctgagttttgtagttaaatgttacctagtgataagtaattcagtattaagggaggagaaatgtaatggataaatttattacagacttaatacaagataaatcaatagtacgacaacttcaaattttagaaaccttgattgatagcaatgaaataaagtcttccaaggatttatcacaaagtttaaagtgtacaagtagaacaataataaatgacatttctcagttaaaactagcgcttcccgaaaattgggatttaataagtgttcaatccaaagggtacctattaaaacgtgatttttcaaacgatttctccgaattaattattccctatttaatgaatagtgaactttatacaatattaatcggtatatttaatcaaaaatattattctttagaaaaatggtcccagttgttatatctagataaaattacactaaaaaaaatgctgaaaaactttcggaagatacttgtgaactttggattggattttaattttagaacgattaaattgattggccaagaaataaacttaagatatttttatataatgttcttttataatatccaaaagtataaagaagtaatcaatttagattctagattacaagaaaaaattaaaagcattactagaattcacaatgtagaaatagattataatatgctagcagttattattagtgtatctataaagagaattgcaaataaacattatatgtcagaagttttagagtttcttcctatacttgatacaaataatttaaattgcataagttcaattatatgcgaattggaaattttcttcaatataaaattcacagaatatgaattaagttattttaagaatgctttttcaataatattagaatggaacattgaagaaaaaaataggatcacagattattattataaaataaacaaaaagacttatgataaaaacaaacatttattccaaacaatatcttctgaaataaatgtttgtttagaaataaaagaaaagataaaacatgacttgtatttcattttacataaaatttacaagtttcaaaagtatggtttatcaataggcgcttttggtaatgaatttgacactgtacatcatgaattttcagaaggacataatagaatttatcctcttatttcttcttggaataaaaaaataaataaaagtagattaactaacgatgagatcaattacataatataccatattttatttattgtccattcaaatcataataaaaaaggattgttattattatctggttcatcagctttaaagaagtttatttattataaactcaatcacgagctaggtgattttgtaacactacaacaaaaaccagattgtatgcataaatttgatgttattctgacaaattatcaaatcccgaataccccaatacctataattcggatctcaaacaaaacaattcaaaaagattcaagttatgttagaaaagttttatccccttttaactaaacttaaggttttagttctaaataatgtatactttccttgtatggaataacttatatgaaatcgatactagaaattgataacatgtatttattttcaattgaagaacagaatacttataagacataattgatttttacgtattgtttgaaagaattctcttaccccaagtgcgtaacgataggtaggagattcttttggtttggcttagccaaacagcgcgtaattgcattttttattttctttattatgtaatcagtcatgcataatgaaaattttgacatgtcaacaaaattggattttaagaacgattaagtgttcttgttatactaccaatagtgtattgacgtgaaatacataaatgataataatttatcaaactatgcagacttatttttcaggttatccgtgaattataacataacactgctagtttagaattatgctgttgttttatattattaattttacatataacgattaatgcttttgaatgcaatttctcgacttaataaattagattttctcaaagtgcaaaaacatccattggtaaacaccttctgcccatcttaactaaatatgaaaaaaattgtgcaaaaagaaattgaaacagttataggattatactttagttttgaatataagaaaattaattaggttaactacgaatttaaatgttacagctattgaaggactaaaaatgaaagatatgttgcaatcaatttatcttagaaaaaatgacactgataacggtaggggaatgtttaccttattttagtttttaaactacacgaacaatgaaaataatgtgtaaaaattcacaaatagattccctctacaaaaacatgtggcagctgcgagaggaatatgtaattttcagaaggattatatttttgtaagtacggtgtaactttcaatagagtctgtaatgtaaatatcaacatcaaagatgaaccaatatttttatcattttagccaagaattctctttcctcaaggagcgtgaaaggatacagtccagtgagtataggtgggagatgaattttcttcgaacaaggggtggcttcctgccttgaaaaaagagcttgtttggctaaaagaagtggatagtattgcgattcagttttctgttcgcaactctgtggatgcttttacacgctttaaatctaagaagaacaacgtacaatcttatacgacaaaacaaaccaatgaaaacattggcgttgtaggaaacaagataaagttgccgaagctaagccttgtttgatttgccaaaagtcgctaagtaaagggacgtattgtaaatgctacagttagacggaatccatttggtagatactttgtgtcattgttagttgaaacagaagttggtgaaagcaaagcgtgttctttctagaggaatgaaaggatcttcccactagaataaacagcgagtaaaggtagatagaattcatgaatatatggaaaattataaaaaacattacctggacaaaagctcaactgaaatcaccaaaaaccactatgttgttggtataaaggttttgcaagtatcgaatattttaaagaatcataagttagcaaaagccattaatgaagtatcatagtcgcaatttcgatccttgttagaatacaaagcaaaatggtatggaaaataagtcattgttgtatcgaaaacatttgattctagccaattatgttctcattgtgaatatcaaaacaaagacgttagaaatctagacctaggtaaatgagactgtccttcttatcttacacgctataatgcggatattaactcaataagccataaggcttctaatcgcaaggactgctggggtagttcaatagctctggtataaatagcagtaaaataacctttggtacaattcgatagttactagacgtaacgattagccgagaaatccccactttagagagcacgttaggaggttaagtgaagggtatttcacaaatgatcgattatatttataggaaaaggatagatcacttcatctatagatgaaattatctatccttttatttgttagataggagatataatttactcatagccccagagaaagtgttaacaggtgatagcatccaattttatagtaagggaggttttactaagttctaataattttctgggtaattagtccttacaacgacttacatttaggaaattgcctgttaataaaatttatatagtaaaggagtgctttaatgtaaaaaaatagggataaatgaatttttgtgaataggaagaccatttgataggtaaatattataattcaaaaagtagaataagcaaaattgagtaacacattaatgatataaactaattttatacaattgaaattgataaaaagttatgagtgtttaataatcagtaattaccaataaagaattaagaatacaagtttacaagaaataagtgttacaaaaaatagctgaaaaggaagatgaacatgaacaagaataatactaaattaagcacaagagccttaccaagttttattgattattttaatggcatttatggatttgccactggtatcaaagacattatgaacatgatttttaaaacggatacaggtggtgatctaaccctagacgaaattttaaagaatcagcagttactaaatgatatttctggtaaattggatggggtgaatggaagcttaaatgatcttatcgcacagggaaacttaaatacagaattatctaaggaaatattaaaaattgcaaatgaacaaaatcaagttttaaatgatgttaataacaaactcgatgcgataaatacgatgcttcgggtatatctacctaaaattacctctatgttgagtgatgtaatgaaacaaaattatgcgctaagtctgcaaatagaatacttaagtaaacaattgcaagagatttctgataagttggatattattaatgtaaatgtacttattaactctacacttactgaaattacacctgcgtatcaaaggattaaatatgtgaacgaaaaatttgaggaattaacttttgctacagaaactagttcaaaagtaaaaaaggatggctctcctgcagatattcttgatgagttaactgagttaactgaactagcgaaaagtgtaacaaaaaatgatgtggatggttttgaattttaccttaatacattccacgatgtaatggtaggaaataatttattcgggcgttcagctttaaaaactgcatcggaattaattactaaagaaaatgtgaaaacaagtggcagtgaggtcggaaatgtttataacttcttaattgtattaacagctctgcaagcaaaagcttttcttactttaacaacatgccgaaaattattaggcttagcagatattgattatacttctattatgaatgaacatttaaataaggaaaaagaggaatttagagtaaacatcctccctacactttctaatactttttctaatcctaattatgcaaaagttaaaggaagtgatgaagatgcaaagatgattgtggaagctaaaccaggacatgcattgattgggtttgaaattagtaatgattcaattacagtattaaaagtatatgaggctaagctaaaacaaaattatcaagtcgataaggattccttatcggaagttatttatggtgatatggataaattattgtgcccagatcaatctgaacaaatctattatacaaataacatagtatttccaaatgaatatgtaattactaaaattgatttcactaaaaaaatgaaaactttaagatatgaggtaacagcgaatttttatgattcttctacaggagaaattgacttaaataagaaaaaagtagaatcaagtgaagcggagtatagaacgttaagtgctaatgatgatggggtgtatatgccgttaggtgtcatcagtgaaacatttttgactccgattaatgggtttggcctccaagctgatgaaaattcaagattaattactttaacatgtaaatcatatttaagagaactactgctagcaacagacttaagcaataaagaaactaaattgatcgtcccgccaagtggttttattagcaatattgtagagaacgggtccatagaagaggacaatttagagccgtggaaagcaaataataagaatgcgtatgtagatcatacaggcggagtgaatggaactaaagctttatatgttcataaggacggaggaatttcacaatttattggagataagttaaaaccgaaaactgagtatgtaatccaatatactgttaaaggaaaaccttctattcatttaaaagatgaaaatactggatatattcattatgaagatacaaataataatttagaagattatcaaactattaataaacgttttactacaggaactgatttaaagggagtgtatttaattttaaaaagtcaaaatggagatgaagcttggggagataactttattattttggaaattagtccttctgaaaagttattaagtccagaattaattaatacaaataattggacgagtacgggatcaactaatattagcggtaatacactcactctttatcagggaggacgagggattctaaaacaaaaccttcaattagatagtttttcaacttatagagtgtatttttctgtgtccggagatgctaatgtaaggattagaaattctagggaagtgttatttgaaaaaagatatatgagcggtgctaaagatgtttctgaaatgttcactacaaaatttgagaaagataacttttatatagagctttctcaagggaataatttatatggtggtcctattgtacatttttacgatgtctctattaagtaagatcgggatctaatattaacagtttttaaaagctaattcttgtataatgtccttgattatggaaaaacacaattttgtttgctaagatgtatatatagctcaattattaaaaggctcttagaaaaaacgtatttaaatttaaagttaatgaattgtaaggaaaggcacttcattctcacctcgttatgtcatagaagaattagaatgtttcccagaaatagataaattatagttagcgatttgacaaacgaaagagaaattcattgtagacagtttagaattacgcattatagatgaatagttttatgcatagttgctttaaatgacacagtataaaagataaacatcactcttataagagtgatgtttatttttttatactgtgttctaacataagtgtatagaaaaacataataaaagtagggggggaagtgtagaggtaaatgaatattcttcagtagaagtataatatgatttttagtccttactaatatcagacgaaattaactatctcataaggcttatattgatggaggattaaagtgtttttataacaattggtgaataggtagctccttcatttatcattttagccaagaagattccttcctcaaggagcgtgaagggtcacagcacaatgagtaggttggagatgaattggcttgttcaacatacataaatcgcgactgcctctctttagaatacacgttcggtgtatggtagccatatacagaaatggaggtgaatcaaatgatgattaataaagcttataagttttatatctttccaaatcaagcacaagcaattctaatcaataaaacgattggttgttctcgctttgtattcaatcattttctttccttatgggatgacttatataaagaggcaggaagaggtttgacctatggtacatgttctgccaaagttcctgccatgaagaaagagtttgtttggctaaaagaagtggatattattgtgattcatttgtctgtttataatcttgcagatgcgtatacacgctttttcaaaaaataaaacagcgcctcgcgctttaaatctaagaagaacaacgtacaatcatataccacaaaattaaacaaacgaaaacattgccagtgtaggtaaaaaataaagttgccgaaagtcgcgaagtaaagggacgtattgtaaatgctacagttagacggaacccttctggcatatactttgtttcattgttagttgaaacagaagtacaagaacttccgaaaacacattcttacatcagaatggatatgggactaaaagattttgccattttgtcagatggaacaacctataaaaatccgtaattttttcgctcattagaagcgaaggtggcgaaagtacagcatgttctttctagaaggacgaaaggatcttctcgctggaataagcagcgagtaaaggtagctaggatttattaataaatggaaaaatatagaaaatattacttagacaaaatctcgactgaaatcatcaaaaaccatgatgttatcggtatagaggatttgcaagtatcgaatatgttacagaatcacaagttagcaaaagcaattagtgaagtatcatggtcacaatttcaagccatgttggaatacaaagcaaaatggtacggaaaacaagttattgtcttatcgaaaacaattgcttccagccaataatgttcttgttgtggatatcaaaacaaagacgttaaaaatctaaacctacgtaagtgagactgtccttcttgtcgtacacatcatgatagggatattaacgcaagtatcaatctaaagaatgaagcaatatgacttctaaccgaaaggactgcggagatagcctaatcaattagagttcgatagaattctttacttaggaatccctcacttctaaatgaagtgaaagtgggggtagttcaaaaaaagcatagatatcttcttctataggtgaagatatctatgctttttctttttaaattaaagatatactttactcatacggcagggaaaattattaacaggagataatatccaattctaataattgtataaatagtttgaacatgtttgaaaattaaccaaacaatttttgttttgaaaaatggattctctaatacacctgttaatgtaacgtatggaaaggagaatagaagcagttaagaaagcggtaaatggatgattaactagatttaagaaagatgaagggtaatttttgagaaataaaataatcaactggaatgattaggaatttcggtattgtgacagttttcaaattttatactagtaataaataaattactttttgaaagtaatatcattacaaaaggtacttggaatcttcttgcttattccatgattccaagaaaaatcgccatttacacactagtggaccaaaatacagaaacaagcgaacatgctagatttgcaaataatggtggtgtctcatctggtatatgctgggtattactgtagatgatttagggaggagcatgatggatggctaaatgtaggctttcatgtttaaagtatgatccttcctataccatatacaaattatgcgtataacaaaagtgagaatgattcctatgtttaagacttaattaataattataatcaaagttagagttgtaattgtggttgtaaataagcactttcttaaaaatattcgttattatcaggctaatttagtatctttaattttaatatattacttaatatttaaggaggaattttatatgaatagtgtattgaatagcggaagaactactatttgtgatgcgtataatgtagcggctcatgatccatttagttttcaacacaaatcattagataccgtacaaaaggaatggacggagtggaaaaaaaataatcatagtttatacctagatcctattgttggaactgtggctagttttctgttaaagaaagtggggagtcttgttggaaaaaggatactaagtgagttacggaatttaatatttcctagtggtagtacaaatctaatgcaagatattttaagagagacagaaaaattcctgaatcaaagacttaatacagacactcttgcccgtgtaaatgcggaattgacagggctgcaagcaaatgtagaagagtttaatcgacaagtagataattttttgaaccctaaccgaaacgctgttcctttatcaataacttcttcagttaatacaatgcaacaattatttctaaatagattaccccagttccagatgcaaggataccaactgttattattacctttatttgcacaggcagccaatttacatctttcttttattagagatgttattctaaatgcagatgaatggggaatttcagcagcaacattacgtacgtatcgagattacttgaaaaattatacaagagattactctaactattgtataaatacgtatcaaagtgcgtttaaaggtttaaacactcgtttacacgatatgttagaatttagaacatatatgtttttaaatgtatttgagtatgtatctatctggtcgttgtttaaatatcaaagtcttctagtatcttccggtgctaatttatatgcaagtggtagtggaccacagcagacccaatcatttacttcacaagactggccatttttatattctcttttccaagttaattcaaattatgtgttaaatggatttagtggtgctaggctttctaataccttccctaatatagttggtttacctggttctactacaactcacgcattgcttgctgcaagggttaattacagtggaggaatttcgtctggtgatataggtgcatctccgtttaatcaaaattttaattgtagcacatttctccccccattgttaacgccatttgttaggagttggctagattcaggttcagatcgggagggcgttgccaccgttacaaattggcaaacagaatcctttgagacaactttagggttaaggagtggtgcttttacagctcgcggtaattcaaactatttcccagattattttattcgtaatatttctggagttcctttagttgttagaaatgaagatttaagaagaccgttacactataatgaaataagaaatatagcaagtccttcaggaacacctggtggagcacgagcttatatggtatctgtgcataacagaaaaaataatatccatgctgttcatgaaaatggttctatgattcatttagcgccaaatgactatacaggatttactatttcgccgatacatgcaactcaagtgaataatcaaacacgaacatttatttctgaaaaatttggaaatcaaggtgattctttaaggtttgaacaaaacaacacgacagctcgttatacgcttagagggaatggaaatagttacaatctttatttaagagtatcttcaataggaaattcaactattcgagttactataaacggtagagtttatactgtttcaaatgttaataccactacaaataacgatggagttaatgataatggagctcgtttttcagatattaatatcggtaatgtagtagcaagtagtaattctgatgtaccattagatataaatgtaacattaaactccggtactcaatttgatcttatgaatattatgcttgtaccaactaatatttcaccactttattaaagtttgaggttcttatgtaaatataagtttatagtttttgatctatctactaaaattaagtatatataatgtatggatgttagaggttgtcttaaagtagttgaatgattactctgaggcaacctctttatttttattcttaggaattcacaaatagtaaaatgatatttcagctatacaaaaaaataaccatagataacataaaagttttcaaaaatacaattaaaaggaatgagataataaaaatacttaaatttaaagaaataacattgcatactattattaattttttgtgacattattaaacctcggtactgtttccaaatgaaaatatgagtatttatgtcaaaattgcaatatatttataatcataatatatgtttgtgaattaataaactaattattttatgtgttttatgtttaatttagtgaaaattagcttttaaatacttatatatatatgattatcattaaggaaaaacaaaatgatttcttagtaggacactattatgagctaaattaataaaagttatttagtaaaataattatgtgtaagatagggggaagaatataaggtgaattttaacaaaaatattattaaatatggatatggattttagcgataactgtagaaatagaaaattttacagtgaaataactacttacatttatgaaacaaagggaggactgagttcttaatatagggaaataatctcagtatttagttcaattctatgttaataatctaggggaaatagcttacttcgtattgaaattaatgtgaacgtgtaagattttaaatccaaaaatttatatggtccattgccagtgggccccaaaataattattaatatcacactttgtgttagacaaggtgatttagaggatgtaaccaattttgaaaaactgttaattttatgggaattcgtaaaatatattctaatacaataacatatgttacaaaaatgaaattgcgatagcgagcgaagtacatggtaaaattggtacaccattcctagagaatgggagcgtaactttaaatgcaaaatgtaattctacaaacactttgacgtacaaaaaccatggaattttagattatgtggaaacggtttaatctattattatgctcccgcatactattgcctatataacggtattattagatgtgaaaatcaaagagggagtcttcactcataacttggagaatgattacccttagttcaatataaggtaatgaataaaagcaggcaaagttagacatattggagatattcataaattcaaagctcttctataattactgatgatccagactactattcagctaaccgaggatggaattttttaatgagaatactgtaacattttaaatgtgttatttgaatatacggacataaaattagaagggtttttttgaaaaagtttaactataaaacccaatatattatcacttgagcagaaatctacaaaaaaatggattaatttaataatgtgcatacctcaagtttaatttataaaatacacttgaggtatgtatccatatagttctttaaactattaatatgcttatttattatatagaatgtcttccgaatgaaacagcaaacacgaaaataatattatagcatcaatattaaaagtaacttttttggatatatatgagcagttgatttcaacaaagactttttccgttactatatagaaacccatatttatgttgatagcataaagactattgaagggagcttgctttagatcaattttataacggatcgagtaagaaaccttgatagacacatcaagaaaaataaaatttttcttatgaattaaaataaaaacagttcgaaatatatacccgaattacaattatatttattgaatctaattcttaataacttattataacaatggagtgaatttgattgtcatttataaaaaatagtaagataggcactaaattaaacggattgataacgatatctatcgtcgcttgtataaccctttccacaataggttttttttgtttagcagaaagtaagaatgcttcaactaacatgtacgaaaataatttattgtcaatccaacatattggatctgtagaagcgaatattttccatgttaatatgaatttaatggagatgatgatatcaaaagatgaaaaaagaagtaaagaattactggcggagatcaacgatgctcgaaaagaaaatgataagttattaaaacaatttgagtctaaaattagttctaacaaagaattaaaattgtataaagatttttacggattatttgatgaattaagaatacaaataaaaaaaatacaagatataaacttatccaataatgaagacttatttacatattatttaaaagagattgaaccaaatattaaaaaggcaatagaatctatccaggaacttattagatataacaaaaataatgcacaacagttacagaaatctaatatcagcagtataaaaaatacaatgacattgtttattagcatatcagttttagcaataataattgttactttaatcggttattttattaaacgtgcaatcaagcaaccaatcatattattacaacaagacatggaaaaagtatctgcaggtaatttaacaatacgcacttcttatgaatctaataatgaattaggacatatagtacactcttttaacaatatgttagataatctacaacaactaataggaaatgtaaagagtacagccaacgaggttatttcttctacagaaggtatgttaaaaaacacaaaaaaagcatcttatctatcaaatgaagttgttcaaaatatttctgaagtaaataccaaaatagaaggacaatttataagtatccaagagaattcatcatcattaaaagaaattgctaccggagttcaaactatcgctgaatcatcaaaaatggttactgaaatgtccgttgaaacaactgaacatgtaaattcaggcagtgaagaaataaaacaatccatccttcaaatgaatagtgtacatgcagtagttgaagaaacctctatagtaatagatacacttgttacacgcacgcagcaaattgataaagccctagatgcaattactaatattgcagaccaaactaatcttttagcattaaacgctgcaattgaagctgcacgtgctggtgaaaatgggaaaggatttgcagtggttgcagaagaagtaagggatttggcagaaaaatctaaagagttcgctaatgaaataaatcatttaatcaaaaatattctacaagatacaaaagctacagttgatgtaatgcaaagggggaaacaaaaagcaatagaaggaaaagaagccgctcagaaggcaaaccaagtattcttttctgttgtaaaggatattgataagatttctagtcaaatgcaagaggtatgtgcagcaacagaagaaatgtctgctggaacagatgaagtgaatatatcattgtcaacagtttctaaaacagcagcacaagtagctaatgggacaagtcatgctgcacagtcaatccaagaacaggcaatctcaattgaggatattgccaatcaatctaacaaagtaaagggaaaagtagaagaattggtacagttagtttcacaattcactatagagggacatggaaagaaggattaaattatataacgtaactttcacttgacttagtaaaacatgtattggtgcaaaaaatggttctattgtgaatttttaagagataaaatttaggtatgattgctagtgatttttgcaatttatcatacgtagaaaaaacgaagtttggtctttataaacttcgtttttttttatatagaatgaacggtttaaatgccctttaaggaaagtgaagcatgacgaatactttaaaatcctaagaattttgcaacacgtctttttatatttctatgccaatggtcttgctcgatgttcgcgttcctttcgaaattggaagcctagtgtatgaccattattaccaattggacaatctaaaagctacattctctgttttcctttatataggaccttttaatttctaaaatgataattgtataaaaagaattaatgttatttaagatgttgaaatattgttaaatctacaattttagcgttacttaaaaataaattatattaagcaacattatttggtgtctttaaagttttttgattattgaatgatattaagtataaaaacagaaagaagggatgaatttggataataactccttgttaatagtatgctttaaaaatcatgaaaactaaaattgtagtatttttctccataacatccataatttttttcatagtattcacttatgtatataatcagaaattacctaatcataagtatccacaatggggtgaatttctaaaatatatttcttaaacaagatagaggagtaagtttaagacggatattaaattaattgaaattggacatatttagagtatagaaaaactgctgaggaggaaattatatgaatattcgagaaagtgaattgccgggcatcggttataaatttcatattgtcacaaaagataataataaaatggtaatcgtgattcatgatgatggacgtagagaaatgtatcattttgatacagaccacgaagaaagtatctcaagtgtctctttgtgtgattcagaggcaagaaagctcgcagcaatattaggaggaatggtatataaacctcaagctttagaaacaattgaaatggcatttgaaggaataacaattgaatggtttaaagttgaaaataaagctcttgccattgaaaaaacaataggtcagcttgaaataagaaaaatatacaatgtaactgttatagccattataagagaaaacatgaaaaaattatttaacccaggaccagaatctgttatcgagaagggggatatgttagtagtctctggagaaagaaacgaagttaaaaaacttattaatgaattactttcaaatagaggagactgactagatggatactttaatttttgaagttggtacagctctaattttagtagcaattgcagcagtagtcgctggaaggcttaaattttcaattattccttttttaattgttctggggatgttagttggcccacacgctccggtaataggtgtaatcgattttagatttatagaaagtgaaagtgtaatctctttcttgggaaggataggagtactttttcttctattttacctaggattagaattttcaatgaaaaagctaattaaatctggtcgttctatcgcgattggtggaacaatctatattttgattaatttttcgttggggttactatatggatttttgatgagattccctttattagaaactttgattatagcgggggttattacaatttcttctagtgctattgttgcaaaagtactagttgatttaaaaagaacagggaataaagaaacggagctaattttaggaattatcatgtttgaagatatattccttgctgtatatttatcagtggtttctggcttagtccttggtgatcatgcttcattcttaggtgctcttacctcaattggtatagctttgggatatatgctcttattctttattgtagctagatgggctactccgttattaaataaattgttgaatattagttcagatgaaatttttattatagtagtattttcttctttattctttatcgctggtttttctgaaacaattcatgttgcggaagcaatcggagcgcttctgttaggtttagttttttctgaaacagagcatagtgatcgaattgaacatcttgttgtttcatttagagacttttttggagctatcttcttctttagcttcggtttaggtatagatccgttttcgttgggtggagctatatggctaacgttaggtgctgtactactgacaatcatcgggaactttgtagcagggatgattgcaggaaggcaagctggattatctcataaagcatcgacaaatattgggttaacaatcgtgtcaaggggggagttttcaattattatggctaatattggtatggcgggtggtttaatgtcagtattgaaaccgttctcagcactatatgtacttatcctatctattttagggccactctttactaaagaatcgagaaaaatatataaatttttaaataaaatatttaagtgggataaaaaatctgcttaaatttagggaaataaaatctttttaattacttgcatttttattgtagagtttctgtagtttgcatgaattgagggattgaattccttgtgttaattaacatatatatcgatttgaaataaaaaaggagctaaaaggatttaatcaactgttagctccttttagctcctttttaggtatatcgaaaaaaaatcaaatcatacatcacgaaaagaagtttttaagaaccattcctaaaatttcaaggcattttagatgttttatgtggaaaagcatggttaacttcatcaataggtgaaaatatctatgcttttttatttcaggacagagatatactgtactcataaatatagaaatatgtatttaagaaagattgaaagcgtattaaataatctgataggagatgtagctatatgacagtattcaatgttaaagaaattaataaaataccttttgaaagtaatatcattccaaaaggaaaccgtaaccgtcctgcatataccatgaatccaagatatatcacaattcacaccactgcaaaccaaaatgcaggtgcagatgcaagagcgcatgctagatatgttaacaatggtggtggatcatctggtgtatcctggcattttacggtagacgatcatcggattgtacagcacttaccactaaatgagaatggttggcatgccggagacggctctgacgatgtattcaccacaccacagaaagacgctgtaacactttatagctcggtttcaatttctattcaagcaatacaagaagttcactttgaagttaaaaatcttcaatttgaccacggtatgttgaagcaggaagttgacactcttaaagaacaacttgaagtagaaaaacttgagaaagtttcaatgaaagctgaaattgctgaattaaaggtattagtacaacaattaataaatgaggaaccaaagcagccataagctgtttttattttgcacaaaatagggcttttgtataaaaaaattttcatgcattcactcagaaaagagttgtctcatagtatatagagattgtcttattaagatttcaaaagggatgtgaatgtatggaagacgtatatgtaaaaatcgaaagcctaaaagcagagcaaaaataaatcatgcgagatattcgtaatttagaaactcgtacaacgataaacgaaaaagatatttctaccatcaatcagcaattagaaaaaatcagtctaaataccacttggattttacgaattgttgtcagtgcaatagttatggcaattttgggtttgatacttaaaggtgggatttaggttgtttatataaaagtatttgtgaaagagggacaagtgtctctcttttttatcttgaagaaggagggaagaatgtggatcgtatcgatgtattattaaaagtttttattgccactttcggtgggttttgtggttatttcttgggaggatgggatgcaacattgaaaatcttagtgacaatggcagttattgattatgtaactggcatgattgcagcaggatataacggagaattaaaaagtaaagttggtttcaagggcatcgccaaaaaggtggtgctttttcttttggttggggcagcagcgcaattagatgcagcgttaggaagtaatagtgcaatccgtgaagcaacaatttttttctttatgggtaatgagttactttcacttttagaaaatgccggaagaatgggcattccacttccgcaagctttaaaaaatgcagttgaaattttaggtggcaaagaaaaacaagaagagaaaaaaggggatgttcaataatggaaattagaaaaaagttagttgacccaagtaaatatggtacaaagtgcccttatacaatgaatccagaatttatcacagttcacaatacgtataatgatgcgccagctgagaatgaaattgcttatatgatacgaaataataatgaagtgtcattccacattgcggtagacgataaagaagctgtacaaggattacctttagaacggaatgcatgggcttgtggagatgggaatggttcaggcaacagaaagtcgattagtgtggaaatctgttattctttaagcggcggggatagatattataaagcagaaaataatgcagctattgttgtagcgcaaatcatgaaacaatacaacattccgataaataaagttcgcacacaccaatcgtggagtggaaagtattgcccgcatcgtatgttagcagaagggcgttggaattcttttattgaaagggtgcagaacgcatataacggtggtgggaatgcaggttctacaaaaccatctaacaatggtgtaggtgttgttataattacagcgaatgtcttacgcgttcgtacaggtccaggaacgaattatggtattgtgaagaatgtgtaccgaggggaacgctatcaatcttggggcattcaatatggctggtacaacgttggtggaaatcaatgggtttctggggagtatgtgaggtttgagggttaggataacaccatttttgagattgttcatactctgagactacgaataaggcctatgtgtatgtgaaatgaacggaaaagagcattcctctgtgaagtgacccctaaaagttagacacggttatttcattaggcagcttgataaaagtgagtccggtattgtaccgggctcatttttaattttgccttaatccgtttcgtattataataatctatatatttttctaattctattttaaagtgctctacattttcaaattcttttatgtagaggaactccgacttcataatcccaaagaaattttctattactgcgttgtcgtaacagttgccttttcgagacatactctggacgatagctcttgattcaagtgtccggacgtactgtctcatttgataatgccatccttgatccgaatgcatcagtagctggtgggtttcaggtaaacgttccaatgctttctctaacatgtctgaaacaagcgaaaattgtataggtaataatttcaccattatacaaatctaatacaggtgatacatacagtttttctccaaacaatttaaactctgtgatgtctgttacccacttttgattcggtgcatctgtatgaaaattacgctctaaaatattaggtgcaattctaccgacttttcctttataggatttatatttcttcatacgcacaacacactttaacccaagctctttcataatgcgctgaaccttcttgtggttcactttctggccacgattcgttaattcatcacgaatgcgacgataaccataacgaccttcattttcctcataaatcgctttaatctcagctttcaaatcggcatctacatctggacgattcattttctttactaaatcataatacgtgcttcgaggaataatagctagctccacgagtgccttcaccgaatatttatgccttaattcatagactacttgcgctttgtcttgttttgtgatttttccttgttttgaactaaggcatttaacttttttaagtactcattttccatctcaagctgtttaatgcgtgcttcaagtgcttcgactgatccttcagctaaaggttgttttacttgtttatttgaatcttttttcatggatggacgcccctttttcttagattgaagggcatcaattccttgtgtttcgagctgttttttccaaacagaaatcgttgaaggggcaggaatattaaagatagctgccgtctcaaataaggacataccgttttcaatcataaagtttagtacgtctagtttaaattgttgtgtgtaatttgtacatcgttttagaaaagcttccagaccattctgtttatattggtttacccaattcaaaatgattgtgtcacttataccgagcgatctacccatttctcgataactttcatttccgttcaaataacgtagaacgatttgtattttttcatcagctgtaaatttagccatagaaaaactgcacccccaattgttagactgtgtctaacaattggggtgcagttcactggcgagtgagggacgctcttttttaacattataaagatatatctctcatttggtttgtcgatagtaatcatatgtaacgaaaggaataaatatgaacaataaaaatcagagtactcttgtggagtgctctgattacataggatgctatataaaaagggaacgtgttaattacattgtatgtagcaacatgctgaaatatgagaaaaagcaatccagggtggtgaggccggaatgctttttctgtatatagaaaggcatcatgctaggagcaatttaatatatgcttctaaagtacgtaatgttccatcaaaataaaaaggcaccttccccagctgaaggtgcctcatgtggtgattctctaaatgtataaatagtatatccaatattagtgaaggatagaacttattattgaccgataaatgtatatgttaaatatatttttacaaaagaatagttttataaatcagaaattcttctaacttgtttttctttcttcataaaattcctcttatattgtttaaagtcttgtttatcgactctgaacttctctccagtagcaacgtttttaactaaatatgttgtacgcttaaattctctaatgtaatagatcactaatccaactaaaagggatatacacattgttgctgggatagctaaaatacaaagaacgataatgaacgcagaaattttatctgattcataaactctttttaacactatgcgttttccagaagcagcttgcgcttgttgtaattgttgcatgcgttgtagcgatgcgacggtatcataactcacgtgttcaacctcctattttaagttgtattgaattaatacatattcataatattttattttgatgtaactacactgttattgtacattttgtctacctgttctttattatatccatatgacagtgtcaatctgtcatctacaaacaaacaagtgcctacattaaagcctcgacacccagccataaatttagaaagtttaggaataaaaccaattgcttcaatatccattaaaataaaacgtactggaatcgctcttttattttgctgtgcaccttttaacatatggctcataaatgaaaaaattcgatttcctatatcgggcataaagtcttcttgttgttgatcatgatctgtatacgtgaaataaacaataattttacgctttaatagttgcagtaaatcttgtttagaatttgaatgtagttctgtataaggaagtaataagatttcataaccctgatcatattttagagcagatgttttttgatacataatgcctttgtaatctaatacaaaaagtgattccgcttcaaaacctatgataaattgctctacttcaattaatccatttttaggatcataatatttttcaataattcgatttaatgttttgaatgatggttgttttgacattgtaattactcctggttatattttttctcttggtgtttttcagtggctaatttttcagatgttttcctgctcaccttaacttttaatccgtattttctttcgtaaagttcttcaaaaacttcctctatttttcgttcaccgtatacttcttttacaatcctcaagttggttttgggtctaggcatatattatattatctcccctcttcaatccaaatttcttccacagtcagatccaaagcttttgcaatacgaagcgcaactcttaacgtaggttcacttttccctcttgctatcatgcttaatgtttggtctgtaatacccaccagtttcgcaagatcagactgttttagcattcgttcggccaagattatctttaatttacacttcataaaatccctcctttttcaatgttctatttcaatttttaaaaacctctaatatttttatttgtggacaaacaagttttaaagttctacatcatatacctatattacttccactcagaagcccacgaagacttctacttggaattccaaatggcatcgtagatattaagagaggagagggttgcatgcgttctcagtatagttatctcaatgtaacgccgtatttatattcatcaaaagaattacgtcacatgtataacgaatcaagatccagaaaagagacggaatctattcttactcacatgaggaaccatgaagtatttgataataaagaatacaaagggtatttcaacttatcacaagttattgaagaagatttatatggagaagaggaagatatattgaattggcaagatttaatggagcggtatcaaattgtagctaccaaatcagggattaaatttcgtgagaaagaggaactggttgaggaggaatggctatgacacttgcaggagaagcagtcattatttggacggcaacaggtttgtctgtaattgcgatgagtgtagctgaaaaaatggggaagagtgttccacattggcttccacgtataaccttgtatacgacgcttacgggctcgttcttatatcttctacgttatgttctcgttatgtttctatgaaggaatatgatgtggaagagagggacagtagaattcataagcgaaaatgcttgttctgtcttcttccaacaaagtgcaatgatatccttataggatatctaaaggagaaatgtttatgctggaattactattggtcccgacgacagctttaactattgcattcgtaagtgatcggtttaaaagtaaaatagatgataaaaagaagatacaagtattttttgaagtgtcaggaattgcaattaaaaaagatgataggattcattatccaacatttaagaagcgaactcatgatgatcgaagtacaacatatgtgtatgagttgcctgttggtatgccgagtaaaattattcaaaaagttgaagatgttgtaagtgaagggttaaataaacctgttcgaattcagtatgacaattataaattgaacatacgtgtattcgatcaagaaataccaaagaaatgggaatggtcaacaaatttaattcaagctggaaaatggcttgtgccaatcgggcaaagtttagaacaattggtttatcatgattttgataaaacaccacatatgacattaggtggtttaactcgtatgggaaagactgtattcctaaagaatgtgatgacatctcttattactgcacaagcaaacaatacgcacttgtttattattgatttaaaaggaggattagagttcggaccgtaccaaaacataaagcaggttgattctattgcagaaaagccactggaagcttttcaggtattaagcgcgattctaaaaaagatggaagaaaaaatgctttttatgaaagaacaccattataccaatgtggtagaaacaaatataagagaacgctactttattatcgtagatgaaggggcagaactttgtcctgataaaagtatgaatagggaacaacaaaagttattaggagcttgtcaacagatgatttctcacatagcgcgaattggtggagcattaggatttcgattgattttttgcacacaatatcctactggcgatactttaccacgtcaagtgaaacaaaacagtgatgcaaaattaggatttcggttaccaactcaaacagcttctcaagttgtcatcgatgaaactggtcttgaatcgattgaaagtataccagggcgtgcgctttttaaaactgatcgattaacagagattcaagtcccttatatctcaaatgaacagatgtgggacgtattaaaacaatacgaggtgaaaaaggatgcatatgcagacacatatcaaaatgaatcgtcagatgatgattttgacctcgattagaaagctaaaatttgcgacaagaagacacttaatggcaattcacgatatgggaggaattcgaaatgcaaatcgaattttaaaagatttaagtccatatgtgaatagtaccgtttataaaaaagagcatgtatattacctcaataaacaaggacgtgcgctattcgatgatgtagaaaaggttgtgcccaccattcgattagcacacagcctcatgagaaacgaagcgtggctgaatctattttgtcctgaggattggcagatagaagcccctatacgttataaagtagatgacaagaagcgaaccattattccggatgtaaagtaccgtgatagtgacgggattctcaatgcagtcgaaatagatcgtacacaaatgatgaatgtgaacagtgaaaaaatgaataagtatggtgaattcacggtgtattataaaaacaaatataacgggaaagtccctatccttcatttctttacactcacaccatttaggcaaaagacgctagaacaatttgctgtgcagcaaggtgtatatgcaaaggtatatgtgatacctgaagtgtaaaagagagcatcacataccaaattcagggtcaaaataatatttgttcatcaaattgtttacgataccgttgaaatacgcaaacttaccctttttcattttgactccatcttttaccttcatcgcaaattctttcatagcttgtacaccaatttgtagttcttgttctttgtcaaacgccgtttggcctgttgtatgatttattacacaattgcattgttttacgaccttccaaaattcttgaattgttttagcttttgaataaaatgctgaagttagggaaacgaaacgtttcggaacccaatgggctacaaattcagcacatttaatgttttctttaggtacagcattattgtcattaccattacgtttatttatatctttactcttttgttttaagattttagtatttgttttaacggtaggacacttcttagtcgtttcagtagggtgcttgtgggacacttcatttacaattggttggataataattgcattagaagtttggcgcatatctttttttcgcttcatggctatttgcttaattattcttaaagtcacaagtttcgtcattaaacgttgtacagttttatatgatacgctcattatctcagctattctatttttacataggaaactaacacctacgtatttgcagctatgacgctttaaaatttcaagtaatgcaattaatttagattgtacatctgcacgtttaatagacgttttaattacatctctgtatactctaatcgtttgatttaattcctgtacatttgaaaatgttgataaattatgataggactctggttgagctaatacatcaatacactttttcataacggtttgtctcctttttggaaacaaaaaagcaacgtcaccgatttattggtaaacgttgcttaataccccttgtatgaggtaaaataactcatgagagtatagcaagtgtttacctggtcagctcaggtggacggtatatacggtggtccaacaccatatatacacgctgtgctcttttgtttttatggtcacattttggtaacgaatgaataaaatttaaaatttattcatgatttttaacgttacacaaaccgttgatatataagggtttattactatttttaaaacgaacgtaaataacctttattgacgaacagggtcaattcctttttttgttttcaaattcttcttctgaaatgactttaaatccgtgtcttttaaataaagcagttgtcactccgaaaccagtttgcttattaccgttaaattctccagtgtaaatcgtagaactaccacaagatgggctgcgttcttttaaaataatatattctgggtgtaaatctttaatttgttctaatgctttataagcaccatttacgaaagctgctgtgacatcttcaccattttttgttatcactttcgcttttccgtctaaaacgtcgtcgccattcccgccaataatttcagcggaaggacgaggtgttggtagtcctcctaatacttcagggcaaatgaggactgtatcttctttttgcagaagctcctctatttttgaaacgagattgtcattcccgtcataacggcaagcaatcccacctaaacaagcgctaattacgatcatattttcatctccattaaaaaatattaactatcacgccaatttcgcttcctgcctcttacttataaatgaggtgatataaatgggaagcttatataatttaatgaaaccatatagtgaatttcgaagtaaagaagagtttaatacatatcaaaaacaagttttgaagtgctaccgatttcaattgaataaaactgattctatcattattcattttttaggaaaatatgcggtgaatgagaaacaaaaaacagtaggggttgcttgtccattaatggggacgattgcgacgaatgttggaaagagtattcgtacagtacgccgttcaattgcaaagttagaggaactaggaattataaagcgtgttgcaacaaaagaaaggcataaacgcggcgggtatagtgcgaacttatatgtatttcttacatctgcgattgaccgcatggatgaccgtatgaaaatgtccgcttgtaaaactgaggataatgcaactggctgtagtaaaaatgagcaaaaaattgctggggaaacaattctttctaaaaacatttcacaaataaaagagaaaagaaaaggaacgtatgagcttgatgagacgtattgccgtcatgatataccgaagccttttatatacgcactggtgccgatgacgagtaatccgaagaaaattaatatattttggagtaaggtcgagcttgcgtataaaaagagtgggttactagaacaaggtgttttactagagcaaatattagctgacgaagaagtgtatggaaatttaatttggcgcgtgaaaagtgttgtaagagcatataaatatggggaaatttgtaaagacattggggcacttttatacagtacagtgcgagatttatttttagaggttggattagaatggggagcagcattaaggagaagtaagggaatatcactatttgatccattcaaaaaagagccatgcgtataatacatgactctaagtggctaatcgaacttccttacaactggaacacgaatcgctacaaatagtacgaagacgataacagctattgcaccacttttcataacggttacgattggaattcccattgcaagtgcaagtgatgtgaatgcataagagagcgggataaagcccattgatgatagcataagtaaactcattacgcgtcccatcatttcttcttttactgtcgattgaatcattgccataagcggtacaatcgccattgcgattgtaataccataaaacatgccggctaatagtgcttgccaaagtacggtgctaaagttgatggctaagaagaatacaccagacaatagcatcatgataatacaaaatagaccgcgtctacgattaatattttttaaacctacaatgatagcaccgattgccattccgccgcctacagatgcttctaagtaactaaactggagcgaatcaccatgcagaacgtttttaacaaaaagagggaaaccaacttgcatcgggccgattaaaaataagtttaaaaaagcgctacaaataaggaaagttgaaaggaatggcgattcctttacatataagattccttctttaatggaagtgaacatacctttatctgtatctttttgttctggcatcgtaaattgtattttttgaacgagtatggcagcgacaatcagtaataaaatcgtaatggaaaagattgtctcatagttcgtaaatttaatgagaataccaccaagtacagggcctaagatgaccgatgcttggttcgtcatttgtgtaagtgaatttgcttgtgttaaccggcttttttctaccaattccggtaagatagatccatccgctgaccagaagaaagcatcagcaagtccaaagaataaagcgaataaagcaaatgtatatagtgttacatcaccgacaatgaaccatgtgagaatggttgcgacaagaatcgctcgaatgatattggagtaaaacataatgttttttttcgggaatttatcagctacagcgccgccgacaatcataaaaataagccttggaacactaagggctacgaaaacaacaccgagtgaagcttcaaggtttaatgtttttgctatgtaccacgtttgtgaaaaagtaaaaaaggctaaagcaaagcttgaaaaaagagtagctgcccaaagaaaaaggaaattcgtattttttaataacggttttccgcttccttctaaagcagttttattttgttgtagttcctccatattgcttcctttctatgtgacgaatttaaactaaaaaacctattaacaatcgttttatacagtttctaatatttctatactgcactttctcattgtagacaataataatgaatttgcccagtagctatttaacgacaaaaaaagatgccgaatgggcatctttttttaggctaacgcaatataaatatccaattgaacgttgtttggatctaacgctctttcatcgtaaagctcaaagtctgttgtgaaggcacgtttattttctttcgaccatttccaaatatattcccaagcttcacaaacgacttcagcaactggtccctttcttgttgtaaataccgcatatgtagcggcaggtattgttaaagttgtcatattttcaggaacgtcttctaatgaagaaacaggcataccgattgtaaattgatatgtaccggtttcatctgattcgtagtttgagtagaaagcgaatgtttctttcgtttgttgatttgggatgtgatgcatcatttgttcttgaaagtatcggttccaaagttgtggaatgtttccttcagtagatgcctctttttcattagtcgtcgtaaccgaaacgccgattgcgtggaaagcttctttttttacgataataggttcgtgtagcataaaaaattcctcctttttttaaaaaaagaacgtttgttcttgtttaatataacatatttttacatgtaacggttgttatttttagaaaattttaatcataaaaaacaaactgaaaataactaaaaaatggtaaattttctattgtatgtataaatagggtgaggagtatgttaaaatttttaagtatcctttaactgttatataaacctatacagcacgatgtttttactatattaaaagtatggtaaaggtttgtataagtgtccggtatatatgctatttttgataaattaaaatagtaatattctatgagatttatattgttgacattgggatttcaacgatacattttcgtaggtcggattgttgcgagtggatatatattgctatgtattcggctactaaatgaaagggttactgaaatgaagtaggcggatagcaagtatatagaaaggagaaaggtagaaaatatgaagcaagtattgaagtgttttaatgtcgtaacaatgatcacacttcttctatccatcatattgccttcgcccagtgcttttgctacagagataaataaaaaaagctgggatgagttacaaggaaatgatgtgaaaattaaggcagatcaagtgaatgctgaaatgtataagggagaagtagcggagagggagcacgtatttcaatataagattgaaaatacgggagatacaccaatccgagaattagtaattaaacaaaataatgacaatggaattgagtttctttcgcaatctgtgaaagtaaacggagagaagttacttgaaaataaggtagcggatttctatgtagaggaaaaagataatggaggaaaggttctttcttctaatcttaaaattcaagatttaaaatcacatgaaaaaatgactgtattaataaaagctcgtcgtgcgcaacattttaataaagagtataagcaaaaaattagtgtgcaaaaggatcaactacaaataggaaacatgtctgtagatgttgaagggcttccttctgaagagaagttagaagctaataccgatgatgaggctgacagtagtaagaaagctatcggatcaacaactgattcaaaaactaaagaagtggatggaaaattaaaagtatctgtagaagataaaaatacatctgcacaaaaaacagaaatagagaagataaaacaacctgaggctgagaagcaactagaaaaagagaaaaagcaatcacctttagcagtaaagcagagtgatgcagaagtacaagctgcatcagaaaatgcttcgaaggttcaaatccaaacaggagataaacaaggatttggagacccgttgtattctacaattgctcctggtaatttagtacagactggtaatgtgacgcttggtttgacatctgatcattatggcagacaaagtatgggttataaaacgaataaaatgacggttgatgttgataacgatgatagtacttttaattcgtcaacaggtgcatttcctaacattcctgctggaagtaaagtgaaaaaggcttacttattctggacagcagcaatggggttaccaggaaatatcgctgatagaaaggttaccgaggatcaagtaaggcaaccagtcaaaatgagaatgggaaataaagaatatgcagaggtaactgctgatagcataagaaaagctgattatctaccttatatttctaattactcaggtagtggcgcaggatatgtagcgtatgcagatgtaacaaatataattgcacagcaaggtatttctcaaacgttgacagttgcaaatgtgccacaaattaaagatgtaacaggtggcggctattactggggtaactggaatcttatattagtttatgaaaactataaagaaacagtaaaagacatgaagatttgggaagggctagtctctcaaaaaagtacagcctggacagatattagtgttaataaaataaacacaccaaaagaaggcgctttcaaggcggaatttagttatttttcatcgcaaggtgatccagctgataatgatggatatgcctatgattatggagagtatgattttgggttagggtatcaaaagtttaaaaatattaaaagtaaagataatgatgttaatgactcatctatgacagaagtacaagtagatggcactaacgaatttgttacgaaaaaatacccaggatataatccagattggacaaattctttcagtacagatattcatacgtatcaccttgaaggacccactcaagtaaagaatgatttgaaagaaggaaaaatacgttttagagcatatggtggtggcggtgatatttacgtattaaataacgccacattcgttacagaacataatgctccaaacttacaagttgataaaaaggcattagatagtaccggtaaagaagttaaggaaattaaagctggtgaagagtttacgtatcaaattgaagtgaaaaatgatacgaaaaataatcaagcgccggtatcgaatgtaaaaggttttgataaattagatgaccgtttagagtatgttccagggtctattcaatatgtttctggaagtaataaaggaaataaaacagatgatgcaagcgatgatgaagcggagtttgtaaataatcaaattgatttccgtgttggtgaaggtgctaatgctaaagacggcggtgttttaaagccgggtgaaagtaccgttattacattcaaagtaaaagtgaaagattctgtacaatcagatacaacagtaaaaaatgtcgttgttgtaaagggacaagatagtgccgagataaagtatgaaactgaggacgatgcaaatgttacggttactaccccaaaagaagttccaggggaaatagaggcgagaaaaatagcttctaataaaacaccgaagttaggtgaagaggtagagtatcgtattacatttaaaaataagacaaaagatggacgtctagatgtattgaccattgaagatgaattaccaagtagtcttgaatacgtgaaagatagtttgaaagccgaaggtgcaaaaccagagccagtagagctgaagtttgaaaatggaaaagtaattgcaaagtatccagaaattatggatatggaagaaagaagtatcgtctttaaaacaaaagtaaaagaaactgcaaaaattggtgaagaaattgttaataaagcaaccgttagagataaaacaaatccaccaaagaatctagaagagaagattacaccacagcataaggccggtaaaattgctgcaaagaaaaaagcaacaaataagaagccgaggctaggagaagaagttgaatatcaaattagcttcaaaaatacggtggaaaacggaaaactagatgcagttacaatagaagatgaaattccagctaacttagaatttgttcaaggcagtgtgagagctgaaggtgctgcaccaaatccagtagagttaaaagtagaaaatggtaagataatcgcaaaatatccagagattacggatacaaaagagcgaagcattgcctttaaagtgaaagtaaaagaagaggcaaaagcgggagaaacgattgttaataaagcggttgtgagtgagccaaatggacaaactgagcatccagaggaaaagattacgccggattataaatacggtaaagtggatgtagaaaaaagcgtaacgaatcaaacaccaaaactaggagaagaagtggaataccgaattacattttataatacggtagaaaacggaaaactagaaaaggtgctagtagaagatacactacctaaaggtgttgaatacgtgaaagatagtttgaaagctgaaggtataaaaccagagccagtagaactaaaagtggaagatggcaaagtaatggccaagtatccagaaattacggatacagaaaaaagaagtattgtttttaaagtgaaagtaaaagattcggcaaaagtaggggaggcaatcgtaaataaagcaattgcaaaagatccgaaaaatgagcctgttgaatcaaaggttgttattacaccgcaaagtaaaaaaggtgaaattgctgctacaaaggtagttaataataagaagccaaagttaggcgaagaaatcgagtaccgcattagttttcataatacggttgagaacggaaaactagaaaaggtgcgagtggaagatacaattccaaaaggtcttgaatatgtagaaaatagcatcaaggccgaaggagaagcacctgaaccagtagaattagctgttgaaaatgggatagtcaaagctaagtatatcgatattatggatatgaaagaaagaagtatcgtctttaaagtaaaggtgaaggaagaagtaaaagtagataaagagattgtcaataaagcaattgttgatgatacgaaaaatccaccgattgaaccggaggaaagaattactccgcaacataaggatggaataattgattcgaagaagacagtagataatccatcaccaaaactaggagaagaagtagaataccgaattagctttaagaacacggtagaaaacggaaaactagaaaaggtaataatagaggatacaattcctaacggtttagagtatgtaaaaggcagtgaaaaggctgaaggtgataaaccagctccattaaagttaagtgtaaaagatggaaaagttattgctgaatacgacaatattacggatatgaaagaaagaagtattgtctttaaggtaaaggtgaaggaagaagcggaagtggggaaggaaatcatcaataaggcaattgttgatgatatgaaagatccgaaagaaccagaagcgaaaattacaccattacacaaagatggaaaaattaaagcgaagaaaatcgtaaataatgaaacaccgaagttaggagaagaagtagaataccgaattagtatgaaaaatacggtaaagaacggaaagctaacagacgtgacagtagaggatactttaccagaaggtttagagtatgtagaaaatagtttgaaagcaaaaggtgccggaatagattcagtagagctgaaatttgaaaacggtaaagtaatggcaaaatatccagaaattacggatacagaagaaagaagtatcgtttttaaagtgaaagtaaaagaagaagtaaaagtcggtaaaaaaatcattaataaagcaactattgatgattcgcaaaataagccagttaatccgacagcggaaattactcctcagtataaagatggaaaacttgaagcaaaaaagatagtaaataatgaaacgccgaagttaagagaagaagtggaataccgaattagctttaaaaatacggtagaacatggaaagctaacagaggtgaaaatagaagatgatttaccaaatggattagagtatgtgaaagatagtttaaaagtagaaggttctaagccagatccagtggaattaaaatttgaaaacggtaaggtaatggcaaagtatcctgagattacagatacaaaagagagaagtattacctttaaagtgaaagtaaaaggtaaagtgagcgattcaattgttaatgaagcgattgtgagcgatacgaaacatccgccagaaacaccgacagcagaaattattccgcaacataaagacggaaaagtgaaagcgaagaagacggtaaataatgaaacgccgaagttaggagaagaagtagaataccgaattagttttaaaaacacggtagaagacggaaaactagcagaggtaaaaatagaagatactttaccagaaggtttagagtatgtagaaaacagtgtgaaagcagaagatactaagccggatccagtagaattgaaaatggaaaatggtaaggtaatggcgaagtatccagagattacggacacagaagaaagaagtatcacttttaaagtgaaagtaaaggaagaagtgaaagtcggtaaaaaaatcgttaacaaagcaattgttgatgatacgaaaaatgaaccagaaacaccgacggcagaaattactccgcagcataaagacggaaaagtggaagcgaagaagacggtaaataatgaaacgccgaagttaggagaagaagtagaataccgaattagttttaaaaacacggtagaagacggaaaactagcagaggtaaaaatagaagatactttaccagaaggtttagagtatgtagaaaacagtgtgaaagcagaagatactaagccggatccagtagaattgaaaatggaaaatggtaaggtaatggcgaagtatccagagattacggacacagaagaaagaagtatcacttttaaagtgaaagtaaaggaagaagtgaaagtcggtaaaaaaatcgttaacaaagcaattgttgatgatacgaaaaatgaaccagaaacaccgacggcagaaattactccgcagcataaagacggaaaagtggaagcgaagaagacggtaaataatgaaacgccgaagttaggagaagaagtagaataccgaattagttttaaaaacacggtagaaaacggaaagattttgtacatgcttaaacaagcgaaaatgtacatgtttatcttgacatttacacataacctacagtcgcataattcttatgcgctgcaatccatatgagttttattggctgcataaattcataaccatattgaaaattgtcacgatattgaaatccaacacgtgctttataactaggatgatatggatggccgtctattaaatggctttcgaactcatcgtaagatttttgagtatattctctcttattatttctttcatattgtgcaatcgtgtctttaaatattgtttgttctaattcgtgtataaaagaatctaatttagcttgttctacactagtaacccgaaaaacttcttctagaaattgcgagacagattgtatttcttgctgttcatcttgaactcttactattaatgagtctaacgaaatacgtccaaatgtcatccgttccctgccatagcatttgtacgtgacacttttgccttcttcatcaagtccttgtattagaaaaagaagttgttcttctttttctatgcgaaccggtgtaataatcccctcataaattaacgattctactaattgacgtagcactcttcttcgtactgaaatgtaatcttctgattcgagcgccttcaatactttcgtatgatatatgtccactctcataaaaccctccaccttatgacaaaataccattatttgtattacgtgaaattttaacgttatttatgaacgaacagccacttctctaacgagtggattatgtacttgcacataaatagcttgctccaatggattacttaactcatcgacatcgaaaaatctcgttagtaaatttgctttacacgctaacttatcttcgtccaataattctcttaaaaatgtagaaggttcccggttatatggaaggaatgattcaagtacagaccttaattccgagagaagaatttcctccttaattaatcctgctgtgccaaaaccattaatgaggccaaacatatgattgaaaattaagtagtaacgaaatctctcatccacaatatagtcgtcatataaatttccagtacgttctccaataccagctaattcattattaagcatctctttcattgaattacagaaataaaatccttgattatcacggaaataatatttgaccggataaccatcttttagctgaacaacgctattttgctgatgagcttctaatgcaacaccatactgtaaatacatccataccattggctttaaagaaatattcatatatcgtctaaaccactctaagcttacttcttcacagcttttactttctaaatctgctaggcgatgaataatattcgataaccgcgtacgctccccaggtatagcgtcttgaactagcccagcaattaatgttgcgtcgtttgcatgttcactataaaaaggattctcacgaataatcacttcaaatccagattcttgtgttccataatttaatgtaataaaggctggatcacaaataaaatcaaatcctggaaatctttctcgtacttcaccaatagccgtatttaacatttccttcccttcaagaccactctcaagttctttcagtttattaatacgcattgaattcgttactttcaccggaaatgaaaacttaagcatatacttcgaattgggatgatatagcgtccttagtgatgatgttgccatataatacttacctacaggaccaatatactcaagcaattcttgaattatccaatcttgtacgtaagcttgatgcaagagccattctgcctgaagcggatgaattggaattaatgcatattgatcttccttacagtacttcgctataaattccttactaaccatctcatcattacttaattcttcttttataatcgttgttgtagaatctgataataatgatttttcatttactatacttttatgtgcccgaaaataatgaagctgacattccccttttaattctggagaatacattgcacttttccaatccaatatcccctgtctactctttggtgtaggatgagttaaatgcccaaataataaagactgctccgcttctataaaagttgtatggaaaccgtataatgcggatgtatcttctattctctcttttgtaaattcctcaatattttgacaactacggataactcgaagcataagttccgcaggattcgttccttctccgtagttgatcgacatctcttttattaaaaacgtaataactgtaacgtaatctgctgtaataacggaattactatctccaatttgataataaaattgttctccaaacaaatggcgatctgttgatgatttatatataacttctccatacaaagtaacgttctgtgccgatagccgacaacataaatatgtggggactgtatctctattcaacgtattactgaagatacttttcattctttcatcctctgtaatccattctccactccctgtttctcttaaataacagtttaaaaagctttgtaatgttgcatgttctgcgatttgtttcgcatgctgcatgttggtcctgctactaaaaatatagataaatgtacattcttagagtattcctgcttctacgtgtcctgtctcgccaatcactcgctactacagtttgctgtaacactccacaggcgtaaattccgatgtagcccaccgtacatatatacaatctatttacgttagtattatatattcttttgcttgtaaaaggttgattgacgcgttcaaatctctatccattacatttccacagtcacattcatatactcggtcggatagctttaagtctactttcttttgaccacaacatgaacatagctttgaagatgaatagaacctgtctacttgacgcagttcaattccatattcctcacacttcgtcaataaccatgttttaaatgtataaaagtactgcttagcaactgctttagatagatgtttattcttcatcatacctttcacattcaaatcttctactgtaataaacgttggcttggttttcaccacaccatttacaacagactttacatacgctaatcgaatgtttgctaacttggcatgtagtttttgcaccctaagaatgtttttatctatattcgctcttttattagtaacagagtgttcacctctcttttttagattttcaaatttacgtgataaagagcgttgttcacgttttaaccgcttttctatcttttttacttttcctgttttgtttatatttttgtgaattttcccatcgctacgtacagcgaaatctttcacgcctaaatcaatgcctacacccgttgaatggagtgttggcttcgcttttgtttcttccaattcacaaagcacagatacaaaatattttcctgctcttttagctatcgttccgctttttacaaccgcatcttttgaaatatatccatactcttttaatctcatccatccaatcgtagggatttttactctatgtctttcaactatccaatctgttttgttgtttttagggaaataacattttacatcttcatttttctttttcttgtagcgtggaaacttagataaacctttaaaaaatcgcttaaaagctttatctccgttcataatcgcttgttttacagctttacttgatatttcttttatccactggtcacattcttttgtatgaatgttgtttagccatttagaaaattcatagccactaagaaatttcccctcggattcatatatctctttgttttttgaaagatatagattgtaaacatacctgcacactccaatcgtttgatggatcttggttatttgttcatttgtcggcttaatctctattagatatgcttttttcatagatcttcatcctccgacattctctttttgtatttcctcaatctgtatatcctacaactaaatatgtgaataacagatatcaaatactaagcaaactcttcttgtggagacaacctttcattagtaacaatgataactttgactcccaacttatgaagaaatccatcaaaccaatcataatcaaaacggaaaaccctatctttgtgtgcgatggtgatggttgaaacatttctctccatgcagtcatcgagcttatatttttcattacgcatatccacgtttacttatgttttcacttactgttagttcctcctctttatattaacgctatcggaatttcatattataattgataatgatattcaattcaagagtatatttcagaatttttttatcaaattaaatttttatttttttctttcttttctttaatctagttaaaagtacactagaaaatttcttgctttcaaactaattacctactattttttattaatccattttttgatggattaataaaaaggtacaccaaatgaggtatacctttccctataatatgtttacataatattattatatgtataattctatatagctgtttgtttttgtaacaaatttaaatctctccaacaatacgctgtttcttctacccttactctctctaaaaatttcgtatcaattttttcaggggtaaatttttcataaaactttttagaaggattattcgtaacaacccaaactaaaagtgattgcatatcattgtttatacaatccgataataaagcttgaaataacttttgtcctattttcattccttgatactgttgtaaaaggtagattgcatataattctccatcacaattatatgtaccagttctttctactcccccatcgatgaatccaactatttctccatttaaattctctgctacaaatctaaattgatgattaccttctttttgaaaaatatcttcccattgtttttctcgtttctcatatgctatattatctagaatttcgtcagcaaatatccctttatacgctgtcttccaactatcaacatgcacctttgctatacctggtatatcatcctttattgctcttctaatatgtattcccatcatttctccccccttattactcatcattatatcaatttcattccttaaaaatccaaataaaaaagagtgaattcacttcactcttttttatcacaattatctactttccacttcaactgaaactactcgatcaatctctttcagggaactatataactctgttgtatataaatcttctggagctaaaataaccatctccagttgctgaaatgctccactatctatatctttaattttcacgcgtttcacatgcatgcctaaatttttaatttgcttaaatataccatctaactcatgatgctctttaacagtaatttttatagataaatccttttgtcttaatgaatacggtcctgcaattttcacaagttgcggaagtacattaatcgctaaaataattaaaaccatagcaactgtcgcttgtaaataaaatcctgcaccaattgcgatccctaaagctgaagcagcccacaccatagaagctgttgttaatccagaaataacgtcattacttcttcgtaaaatgacacctgcgccaagaaaaccaattccactaacaatttgagcggccagtcgcatcggatccatatttgtatgtcctggaacagaatatacatgcacagattcaattgaaaccatcgtaattaaacaacttgctacagaaataaccatacttgttttcacacccagtggtttattctttagctgcctatctatcccgatgaataatcctaaaaagagtgctaaacctaatttgagtaaaaattcatatgacatattcccattctccttactttacaatgtttcccttagaataactcactataactcttttatgatatcaattccagtcttttctattcatttaacgtaaaaaaccgaaaaaacatttataacgatgtttctccggctttttattacactttagattcttctttatttctgatctttaatcttaatttctgcatctttgtagaatgctaatttactgtcattatactcttttgtaaatttgttaaactgctctttcgacttttgtgcttccacatttaattcattaacagttttaactttttcaccgatttcttttaatttcgtttcttttacttttaatttttcatacagttctttttcagtcgctaacactttcgtgtaattttcattcatcttttggaatgcatcataacgattcttatacgactcttctactgcttttgcttgtttttgtaacttcttatcttcaatcttctctatattactttgaacagatttcgtttccttctgtgctttttctagcatttctttctcacttttcaatactttttcacgatcatctacatttgcagtagcttgctctattttcttcacaactgcttcattatgatctttaccttcttgcaaaatttgagcatataattcttgcccttgtttctctaactgctctaatttttttgcttcatccactaaagatttttcttgtgttgctgctgtttcaaaagctgtatatagattttcttctggcttttcaccgaaacaacctgttaaaagtcctactgataatgctccaactactgctacttttccatacttcaacgttcattcctccattacatacggttatcatgccagaagttcactgggaagtgactttcttcatgataagcttcgaactcataacctttttcttttagcccttttaaaattgctggcacagcagcaactgattgcgggtgaatatcatgcattaaaattacttcttgtggttttgttgcgtttgttaatacattttgagcaatttgtgctgcagctgcatcaactggcattttattgtatttccaatctaatgaatcaattgtccaatcccatactttaaatccgccttctaccactttatttcgaagaccttcatttaatccaggcatcgaaccatatggaggacgtgttaatttaggtgatttcccaataatattagcgattaaaccttgatcttctttcatctcatttacatactcgccatttttatataactttgcgaaattatgtgtcatactatgcatgcctacataatgaccctcagcattttcacgtttcactaaatcaggaaattcttttacattcgctccaattaaaaagaacgtcgccttcgcatcatgttgttttagcgtatttaataattcagccgtatatttccctggcccatcgtcaaatgtaagataagcaacttttctttcttttccattaaaacgacttggtgccgttttattcatttcaactttcggctgttcacttgcaagctgcactacattttcttgtttcgcaacagcttttgctggtgaagtaattgattgaaacatgtaatacccaatagctactgcggcaatcgctattaaaacgactactatttgtttaatttttaaagctttttccattctatcgaattcctctccctattaatcttatatataaatcgcccaatataattatacatctatttatttttatttcaccatataaatagattttatttgtattataatgggagttttatcaaaattgttgttcctattccttctttgcttgtaacactaagcgcaccgccatgaagctctaccatttttttaacgatagctaaaccaatacctgcacctgcagcatgattattaatttggtaaaatgattgctcaatatatggtaaatgttctttagcaattccaataccttcgtctcttaccttaatcactgcttgtccttctattttagtcgcttcaatgtgtattgtgcttttttcatgtgaatacttaattgcattttgaacaatattcaagaaaacttgctttagcctatttcgatctcccatcaattcaattcggtctatagtagtaataaattgaatttccttctcttccgatttaggagttaattgccaaatcgtctcctctagtatatcgtacaattgcaccttttgtttatataaattaaaatgatttgattgtaatcttgaaaaatctagcaattcttctactaaatgaattaacctatctgtctcacctgaaataatgcccataccttgctttatttcttcttctgttaaatgatctactgtttttaacgtctcactccaacctttaattcctgttaaaggcgttcgtatttcgtgcgaaatagaagcaatgaattcatttttcatctgctcagccttatctattttataggccatataatttaaactatgtgccaagtcacctaattctccaggataatcttctttaattttttgctttaatgtgccttctgcaatttgtgaagaggcttgaataatggattcaattggctcaacaaatgaatttgccaaacgtctactaattaagaaggcaactcccgaaataacaatacctacagaaatagtaaacgtaataatttcaataatctttttatttacatttgttaaaacagtcgtgtattttaaaacaccaatagtttgtccttgatgtataagtgggcttagcacctctagttgttttttattacctttcgtagtaacttgattatacatttcaccttctaataatgattgtggaatattcactttaccttctaccttttcaccacttgaagattgtataaccgagccgtgacgatcaattaactgtaattctgttccttctaattgaaagctactaattatgtcaccactatattcttgtaatcgaataaagtatagtgaattgtattctgaaaaaaaacgtgtactcgttttcgcatgagactctatatattgcacaataccattataatagtatcgataaattgagactgaaaatacaacttcaaataatacaagcataagtgtaatgaccgtcataaaatatagagtcactttccgtttcatcttatactttccttccacacatatccttttccccacaccgtaagaataaattcaggttctgatggattacattctattttttgacgtaaccgtctcatatttacatctactactttcgtttcacctacgtaattagttccccaaatcatatttaaaatttcatcacgcgaaactggctttgaagcctgattcattaaatactgtaatatcatatactctgtaggtgttaaatcgactaattgtccatctttatacaatctttcttctataatatttaacgaaaatggacctgacgtaacaatattcgttttttcttcatgtacttctattcttcttaataaagactgtatacgtgcagttaatactactggactaaacggttttgcaatataatcatctgcacctattcctagtccttgcaccttatcttcatcttgtacacgtgcggttaacataataatacccatttttttattttctttcctgatagccttacaaacttctaaaccatcaatccccggtaacattacatccagcagtgctatatcaacagtttgttcactcaaaatctgtaacgcttcttctccagtagtagcttctattacataaaatccagcacgttttaaatttaaaacaataaagctacggattgttaattcatcttctaaaactaaaatttttgacataattcccacctcctactcttgttgataatccgctagcggttttatatatgctttcactttttcaaatttcgattgcttcggtactgcatatacgtgagaagctgttttaattgctgcgctgtagccttttatattgaaccattctttccgcttaaaaatatgaacttcaagccatatttcatttgttcttgtatccaaaaacttttgagaatttgattctttttgctgatctggtattgtaattttccctattaactctttaggaattttcacataataccctttttctatatctatatatcgttcttcaattggtttaattccagattcactccactgtatgtaacgttcaaaaagcggactatcaccatgtgatttatcttcccaaccttttggacgtacagtacgaacaaattcaataatgccgtcttcattaacatctttactttctacaacatattcattaaataaatcttctttcccatctataggtaatacttcataatgatcctgatcaaattttgctacataagttatacctgaatgagcgccaactcctgcatcaattaccaccgcctttagtgatttagatatacgacccatttgtattctttgaatactatttataaatggatcgtatgacacttcagataaagtcttaaattgttccatgaactcaactgtcagcttctcatctttttcaaatgtaacaaggcttatatctttcagtccattttcatttagatcctctatgaataacttcgtataacttcgattatatatttccttcatatcttcattttcttccgaaaaaacatacataacatgttctaacgattcacgatttacagagattccgattaacaactctctcttcccgttccctgtaaaatcaccgacttcaacgatatctacatctccaccatcaaatttatgtgtggactttattctccagccatttccgatttcttcatatacggctaaatatacgctatgatcttcattcggcaatttataaaataagatggcttctttcttattatcttgtttaaaattcattgaccaaatcatctgtttatctttgttagacattggagtaagtaagcgataattaacaggtaaatctttatcaatttgttcctttaattcattaatccatttttcatttgtaggagcttccattagacttgttggagcctcagacattttacatccagtcaatataaagataattcccatcatgcttaaccatttctgcatatgatatctttccttaccacaaattttgaatatgtccttttacttttttacctatccattatactcatacatatgagtataatttttctaaactaaaaaatcgttacagaaaagttacaaatacattcccataaaaaaagattggcaaaagccaatctttttttattattcgtttcggactgattttggcgttacacctaaatgatcatttaattttttggaaatgtcttttacatttttttcatttggaatgtaataataaataccaccgatacgtttatctgtaccttctatttgcattttttccatttccaaattagatcctgccatattttttgtaatagcaagcatatcgtcaaatgttaagttcgttttcatgtttttatcaaccgcatccagtaaagagcccattttgctaattgattgaacagacatcgcttttttagcaattgcttctattacaagttgctgtctctgtccacgcattgcgtcactatcaattttacgcgttcttgcaagtgcaagtgcttgttctccatttaaatgttggtaacctttttctaaatggatcataccagcttggtctttactatcttgttcagtgaaagtaactggtacatcaatatcaataccaccaattgaatcgacaatttgtacgaatgattcaaagttaaacttcacataataatcaacagggacatttaaaaatctttccaccgtatcacgtgtgctttctacgccaccaaatacgtgagcatgagtaattttatctagtttttttctagttggaatgtaaacacgtgaatcacgtggaatacttactagcttaacagacttatcatctttattaattgttgctaataaaagtgcatctgttcgaactgcttcgccatattggctttttctcatttcacttccatctacacccatgattaatattgaaatattatcctttaaaggttcaacttctttatcacgctttgatgacttatcaatttttgcatacgcatcatttacaacagcttttgctttattatatataaacgaaccatatcctactcctccaaaaataagtaggaaaaatggaattaatatgaaccatttcattgactttcttttagaacgctttttattacttctcgtattttgttctaattcagagctcatacccattcgcctctctttctctttaccaagtataatgtaagtctatttatcttcatattgaatttcctttcactaaccttacaattttgtaaggttactacttaaacccaatacgtattccatttcacattatactctcgtacttatttttggcaagtcactatttaccaatttcaaaaatttagcacttcgcaacatacggatttacaaatttattaactctttcattttaaattagaatgtctttttcctaacaaacgatatgaataaagaatccagctaattataaaatctctatgaatacagtatatttaactttattatttctcaaacggcgtatacacacttttcttcccctgattatcaatgtaagccgactttgcttttattttcgttttttctacttccatgtcttcatttgagaagttcacaatgattttaatatcttttccataagaaacagattgtactagcttatcttctgacaaatacgcaaaattcgtcatctcttcttttactgctttttcatgaacttcattccaaacttttagatgctctgtaatttcttttttatgcttattccactctacttcatctaaatggtacaacggaggaacattatacaataattcagacagcattcgatttccaacttcatcttttacctttaaacttccccattcccaatgatgcgttgtaataacggaatcattgtatactaatttatataatggtaccgaatatactgggtttaaatatacttgtttatattcttctttcaatggtacttgttttgcatatttttcaggcacattttgatttggtgaccaatatccaccgacataatacggacttgttttatttttccgcatatcttcatcgtcccatttaataacaggtgtttcaattccgtgtgcaaatgcaatcgtactactagcaaaatcatttccgccttcagaaccaacgaccatacccttttcttgcgcaatgtagtccattcgttttaaacgtgcttttaaatcttgctcttgtgtcgttatatgtttcgctgaatagtcatcgtaaatttcacctgtcgcatcacaatcaataaaccatgaattatatttaggaccattttgtaatatatcattcatgcgttcctttacactaggcagcgataaagtcggatttaacttgcgacctcttcctaaaaagccttgcaccttttctccgtttttcttcgttacagtagcctcttcgtataatgacgggtcattaaaggatgctgtgttccaatttttatcacttttttcgtgaatggaatgatacgaatcatacggaccaactaaataccccatttccttagcttttgtcacgaaattaggttgcataaatccttgttcccagttcggcagaccaatccacgctttttctattcctgcctctttcatttcctttaatatatccgttccatctgcattaccccatttacttacctcttcaaccgcatcaccaagtagcgactttaataaatgcttatttaagctatacaattctgtattcgttaagtgacctacacctttctttaatagcacactagcttcctgattaacgttttgaaaaatatcctctttataaaattccttcatcgataatacttcgtttatataacgtaaaataacatttttttgatacttatcaatgaaatcttgtttacttacttgatccaatacattcagttccccaggctcggaactattcttttgaataagttcttttatatgactaaacagcgggctatttatttgctcccttagttttggccaatttatattattttctaataaaccattttgattccaaaaataaaaatgcgccgctccatataacttttcgatttctttattttttctagccttttcttgtaatgttttaaattcaccttttcgaacaatatcatccttatacagtttagcaatgcttaccgcatcattatttgtcacatataattgaaatccatatgttttatttttatttatgctcggaaattcatgtgtaaaatcaaatcctattttcggatccgaatgaaatttcaattcattattaaacatattcgttgcaatatatacaattgaatatctcgaaccatttaatgcgaaaaacttcatagaaaatgattcagcaaatgaatatgcatcatcctttaaaaacttcttccaattctcatcattgctcggaatttgcttaccctcccataacggaagtgtataattttcagcttctactttcggccatgtaaagctttctgcaccagtcgattccacttcaatgtttaagtggtcttttttcttttctaattttatttttactttttgatctggatattcccacgatgtacgatccttttctttttttacattcgataccttcattttcggtaggggttgtgatgcctgttcctttgccccctcatgttctacagttaatgtgaatgtttctggatttacatcataagtaaaatctttatacgtcgctttctttattttagactcttgtacagcattactaccttttacgtcacaaccgactaaagtcgaaaacgacatagttgtaagaagacatatcgctatcatttttttcatcctctgcacctccaccaatgaatatacagatgctttgttacaggaatgtggcaaaaaataatagagctagcattttgctagctctgtttggagtattaaaagttgatatgaacaactataattcgcttagaaaatatgtaatacagtaactacattttttctcaacaattatgaaactaaacaaatcaaaattttaacaagcattcttcaactgaaaaaataagtgtatacaatatatcctaaaagtagtactaaaatgattattcctgtacctttccgattcataccgcctgctatatcaactggactacccgtttccgctctattgagtccgtcacgtaaagaacccgtaggattactttttaattcactttgtctcatacgctctcttttttcttctggtgactctttattcatttaatcacctccaaaatgaatgcactctttacttacattattcaaaatcaacatttgttttatatttttccgaaaaaacctaatttaaaataggtttgcaacgtaaagaaagctagccatgccagctttctttacgatccaatatgctcttccttatttacaataatacctttatggtcgatttcaagctcacatactttcatatctgtaaatactctcgctaattgctcagcgatttcttgacgcttctcatatggcgttaatataaaaatagatggccccgcaccactaagtgctgtgccgtacgcaccaaattcttttgcgcatttacgaatagatggtaataatggtacgagttctaaacgatatggttcgtgaaaatggtctctctccatcatttcacctacaacttcccaccgcttttgacataatgcagctactaatacgttacttatcgcactagctttaactgcctcatgaaacggaaacatctttggtaatacagatcgactttcatctgtatttaattctgcattcggaatgagagaaattacccccaattccttgctctcaattcttacgacggaaacatcctttccatcaagtgctccaattacagttccacctaatatagaagcagcaacattatcaggatgtccttcaaaatttgtagcaatttgaactttttgatcagcagttaagttcaaattgcctagttgattcgcaagctctatcccagctacaatcgctgatgcactacttcctagccctctcgttaatgggatattactagtaacttctattatatggggtgatatagaaggacatactttacatgccgtgctaacgattaaatttttatcgtctgtcggtattgattcttcaaaggaatggattacttgccatttatcagctttttctttaaccaccacacctaaatacaatgacaaagctattccaactgaatcaaatccaggaccaacattcgccgtactagcagggacacgaacgctaaatggtatcacgacataatcacccctttaatatgatctttaatttgttctatatcatttgacacacttgcgatgtctagttgatttgaagaaatagcgatatcaggatccttcaaaccatttccagttaataccgcaacaactgtttctccctttttgattttcccagattgaacatgtttaattacgccggctaatgaagcatttgatcctggttcagcgaaaactccttcagtttttgctaataacctatacgcatgtaaaatttcttcatctgataccatatctatttcaccacgagactgctcggcagcctctactgcatacgaccaacttgctgggttaccgatgcgaatcgctgttgcaattgtttcaggctcttcaattacatgcccttttacaattgcagctgctccttccgcttcaaagccatgaattcttggctttttataacctttttctttctcatattcacagaagcctttccaatacgctgtaatattccctgcattcccaacagggatagctagaacatctggtgcattttgcaattggtcacaaatttcaaacgctgctgttttttgcccttcaattcgataaggatttactgagtttactaacgtaatcggctcttctgcagcaatatttcttacagccttaagcgcatcatcgaaattcccttctattgaaataatttcagctccataagcgaccgcttgcgctaattttccatgtgcaatctttccttctggtattacgataatgcatttcatcccaagacgtgccgcatatgctgcagctgacgctgatgtattacctgttgatgcacaaatgattgcttctgaaccttcttctttcgccttagcaactgccatgaccataccacgatctttaaaagaacctgtcggattcgctccttcgtacttaccatatagctgaatccctaattgttttgatatatttaataatggaataagtggtgtgtttccttccattaagctgacatcaggtgtattttcattcaccggtaaataagacgcatattgttttaatagtcctttatacatattgtttttcctcctcaataatgtagtaactgtttatttcacttgcgacagcttctatcgcttctaaaactcgttcaaattgatacttggaagttcgatgtgtcacaacaacgacttctgccagttcacggtttaaaggtaattgaataacctcttttaaacttacagaataattaacgaaacattctgttattttttgtaacatcccaggctcatcttgtaatgaaatgcgtaagaaatatttcgaaactacttcttcatcaccttgtaattcataaggaactggttcttttaacgcacttttatttttcggaacttgattcatatttttaacgattgaaataatatcacttactacagcagaaccagtcggtaacttcccagctccgggtccataaaacatcacttctcctaccgcttggccatggacatacaccgcattaaattcattattcacatttgataatggatgctggctcggtaaaagcgtcggttctacacttaaatgaatggctggtccttgtttttcagctttaccaattaacttcatagtaaatcctaacttttcagccatttgtaaatcttctttttcgacctttcgaatccctcttacttgcacatcatctaatgaaacattcatcgaaaaacctaagtttgcaagaattgctacttttctcgccgcatctagtccatctacatctgctgtcggatccgattctgcaaagcctaatttttgtgcttcctgtaaagcctcttcataagaccatccattttgactcatttttgttaacatataatttgttgtaccatttacaattcccattattttttcaatttgatctgatgctaacccatcagttagtcctcttaacactggaataccgcccgctacactcgcttcgtaacataaatcacaatcattatcgttcgccagttgaagaagctctgcaccatatacagccattaaatctttatttgctgttacgacatgttttttatttcgtaaagccttaacaatatgctgttttgcttcttcaattccgcccattacctctactacaatatcaatatttgaatcatttagaacttcatctgcatgacttgttactgcaattccatcaatacaaacatcgcgttctttttccaaatcacgtacaacgactgttttcactttcacttcgtatcctgtatcaagtgcgatttttttataatgttctttcaaaatatgaacaacaccacttccgaccgtacctaaacctaataccccaacatttataacgttattcatcttctaatctcctcctaaaagtttaattgttacatctataaatcaccttactctgcttttttgtcatgcaggtggtggttatttccgtacttataaatcgtttcatattaccgcacctcctcgtatgataaagttaggttttttaggaaagggatttacctataaacccgtgaggtcgcaatttcgatccatgttagaatacaaagcaaaatggtatggcaaacaagtcattgtcgtatcgaaaacatttgcttccagccaattatgttcttgttgtggatatcaaaataaagacgttaaaaatctaaacctacgtgaatgggactgtccttcttgtcgtacacatcatgatagggatattaacgcaagtatcaatctaaagaatgaagcgataaggcttctaaccgcaaggactgcggggttagcctaatcaattagagttcgatagaactctttacttaggaatccctcacttctaaacgaagtgaaagtgggggtagttcaattcattctttttttccttataattcgatcttgtaatcgctgttgttcttttatcagtcattcctacataagcgttggatatattgcaggtttgtccagactgaaaagagcttattaaaccatccattattcgcattcttcttcatatatttgtaccacaattatttttttgttgttaaaactagtttttaagaagcatatgctttagcaactgcagaaattctgtatcacttttatcatcttttatataatcctgttcgtagttaaaaatcattcgtactaacataaaagctgtaagcggtaatgggaccttatgcaaagctccttgctgataacctttttcgagcaaattacttatcatgttaattgcttcttcttcagattgtttaaaacaagttgtaatttcaggtgaatggtactctttatattcttgaaagagtgtagaaacaaacggatcttgatgatattctaggctgatataatgaagaattttttgtattcgaagtaaaacatctttttcttctttatataaattaaataattgtgagcgtttaagctgaatatgacgcatatagcagtcgcataatatttcagttttatctgtatagtaataataaatagtacctttaccaactttagctgtctttgcaatttcatcaaccgtcgtgttacggacaccacgcgtagagaacagtattgtggcagattgaatgattttcatctttttattctctttttctaatttgatcattgtctacaccctatccttgatatatttagcgaagttttcggcctttacatactgtataagttcatttgtaattttgtaactcctaatagaaagtcctctatttgtttcttatagaataacatacaccattcttatttctagtatataactataatagaatgcaactttataacctagggataaagttgaaagtttgaggtaataatttttataatcggacgatgagaattcaagtgaaaggggacagtgatttctttcttgagtgaattatttgattttttatttaattcattttattatataaacatgactaaaagatgtttttagtcggattttttttacggaaaaccgactgatattggattttagtcggtttctatactatttgagagaaggtagacactatgtgtggaattgcagggtggatagactggtctaaagacctgtctcatgaacaagaaacgttaaaaaaaatgacagatgctatcattcaccgaggacctgacgcagaggggcattggttttcaaaacgagcggcattaggtcatcgacgtctcatcgtcattgatcctgaaggtggccttcaacctatgctctataaagatggaaatgatacaattggccttacgttcaatggagagatttataattatcaggaattacgtaaagaacttgaggagaaaggtcatgaatttcagaccaagtcggatacagaggtattactacacgcttacttagaatggcaagaagattgtgttcaacacttaaatgggatttttgcttttggtatttgggatgaaagatttgggaaattgatgcttggtcgtgatcatctaggtgtgaagcctttattttttgctcaaaggggaagcgcaattctctttggttcagagttaaaagttttactttcgcatccacttgtagatgctgaggtagataaagaaggactttctgaaatattctgccttggaccaacacgtactcctggtcatgctattttcaaggatatacatgaagtgcgtgctggccattatatgacgtttacctctaatggctcgactacgacacagtattggaaacttgaaagtaaaaaacatgtagatgatattgatacaacagtcgagacaatccgctccattttacaagatacggttaaacgtcagttaattgctgataaaccagtggtatctatgctttccggaggtttagattccagtggtttaacaggtttagcaggaaacgaatttgggaataaaggggaacgtcttcatacatattctctgaatttcatcaatgatgaaaaagactttgagcaagacttccttcgttttgatcgtgatgaaccttgggtgaaacgtgtggctgaatatgtaggaacaaagcatcattctatagagttaggatcagatagtttaatagagtatttattaactccaatgcgagcgcgtgatctacctggagttggagaactagaaacgtctctttatttgctatttaaggaaatgaagaaagacgcaacagttgccctttcaggcgaatccgcagatgaagtattctcagggtatccatggttccatcaagagaagtttctagatgcagagatattcccttggagtgttaatttatggtatagtacagaaattttatcagaggattttaaagcgaagattagccctgaaaaatatcaaaaacaaaaatttgaagatgcagttgctgaggttccctttttagaaggtgaaagtgatctgcaaatgaagcaacgtcaaatgtcttacatgtttattacacgtttcttgccatttatgctagaacgaaaagatcgcacaagtatgatgaatggctttgaagtacgagttccattttgcgattaccgacttgtagaatacctatggaatgtcccattcgaaatgaaaagcatagacaatattgaaaaaggtattttacgtagagcttttgaaaatgtacttccagaagatgtacgttatcgcaaaaaaagtgcatatccaagcactaaggatgcctcttatctacaaggtattagtgattggatgttacatgtgttgaacaatcctgaatcacctattttgccattaattaatgtagaaagagttcgtgctattgcagaaggaaacgacgaagtaatttcaggtaatgatgcaagaggtataatagattatttacttcaagttaatagttggcttcaggaatataatattaaattagtatggtagatgtaattttcaaataaagagaatagctgaaacattaatgacctaagtaaaccgcatttccaatggattagatagttatctaacaattggaaatgcggttttataaaaaataataatatgtttataaatgtaaaacctacggaaacttttcctgtgggttttttaagtagtttttacgaaattatgagtgttttttattttgtatttcaataagttcatcttgtaccatttttatataatattctttttctgttagttcaaatataaataatgcttttttccagttataaacaacatcttctacattgtgttgtttaatctttaataaacactgaccttttaaatagaatagttcacctaataggtataaagtatttagattaattgctaatttgatgcccctatcaatgtattttattgcctcttcatgttgatatatgaagtctaaacattttgctaaattgaaaatgatttttaatttaatttctttatctctaggaagatctaacttattaaaattagttaaacatctttttaatatcttaatacttttttcatattctttgttttctccatgaaatatagccattgtctgcataatatgtatttctctttctgataaaaaatcagaattggttaaagttagttttaatgcatgatttaaaagagttaaagcagtttttgttgatctatttacctcaaatatagcgatcgcttcatgccatattagaaattgtttctcttcttttgtttgaaaattatttaagtttttctctttttttactatttcataaagttctttatattgtttttgctttaagcaatcttttattacatattttacattttctgtatattttaatcttttgttttgagttagtgcaaatatatgattcggatcaatgccaagtctttctgataattgatataacaatatgctagatggataaatcacacctttttcgatcttgctaatttgactttgtgaacaaattccatgacacaattcggattgtgatatgtttttttttattctaagttctttaatggtaatacccaaatcgttaaattccattttttcacctactatttagcactgtattagtataagagctttctctaacttttaatgtaatgtaaaattaatatatttacaattattatttgttttaaaggaattaccgtttccataggatggtgaggcttttattatgtacaaaaaaagacaccctaaggtgccttcctccgacttgaaccacgttcatttagtataaacttatccgtattatccctttgttatacgtgtaaacacaccctataaaacagaatcgtctatatacaccagattgttagtttacaaagtacaagagatttgagatcagtattagagtgacgcgacaccttccataatgattggtatgttacgcctttcaaaagaatctgctttatagaatgtatccacgtttattattttactatatataaaattcattcggtgtattttttccagatatgtataattgcataaagttgatgggaaaatcagagtataatttggattgtgtaataaagataaggcccacctacggaaataggtgggtttttgttgggtattactatctcattgcacacaagggaatttctattaaaatcatagcatatttttatagttcttatattgagaaataaagaaaagacacccaaataagagtgtcttttcccatagttttttagcagaagcaactgcatccgataatgattaaaagtataaagagtacaacgagtaaagcaaaaacgtactattctacattatctgaattaaaggtagctacgaaaaatagaagtattcctgaccttgtaaagaaaggtattgtagatcgagaaggaaatggatttactccaggtgatgatgatacattttatgtaatgttcacattcgtagatagcggtgaagaccaaaatgtatttcagggagatgcattgaaattaaattgaacgtttaattccatgcaagcaagcggtgaagaaaagtaagtgtaataaatttgtatactctatgtttaaaattgtaacaagaagcataagatggccgttttgatcaacttattcctttttagtttgcggccaacgtatgctttcgactccgttgaataattaggtaatcatctacaaaaacgtatagtatacaattaaaagaactgttttaaaattgaggagtttatcgtgaatggtaaatattctcataaatatatgggcgagaaaactgatgacgatttccttttttttaatacatcgtaaaatatattttacgatgtatattgttgtatgttggagagtataggaatattaaataattatcctgcttttgagatatcttgaggggattttactcgtaatgtggaagaaaaacagttttggaaggtgctcaattatataccatattcattggtaagagagagaaaagaagtaaagaatcatgaatgaaaagggggggatatactatattacgacaaatgaagcctttgtatatgtgaagtagaaaaagtaaaagattacctgtaaagggtggttgaaacttggtcttactatttatttttttaatctctttttagagttcaactatttgtactagctattctataggagtaaggtttaaagcacgaaaataaatttcggtattatatgtaatgagttcttcttttttatgaacagataaaccactttgtaggatagctgtaatattgaactactcaccacttaacgtcctaacggactgtttgaagtgggagattcctgcgaacaccgatgtatccatcagttatcttagcaggctctacccgcagtccctacggtgagaacataagtatcttgtacgctgactcaccacactccctactttagcttggttttcgcgattttgagaagcgtggggcgatagaacgttgaagattttacggttgcaacgtttttctgcaaccaacctcatatcttcagttttcgaagagcaatctgtacaagtaaatgatagcaaatatgttggcttatgccaaccgacattcatctcccacctaaaattggcgtttcacaccttcacatttttgaggaaggagtcttctatcggaaaacgataaaactactattttataggaatacatttccgaatgatctattaccatcaatttaatatttttcaagtttcccaaaaactgaagtaattactaaagtctttataaggaaatagaaagctttttaaatcttgactaatatcttctagattcccatatatattatctgctgctaaattaatgtcctcattaaaattatatagctgttcatctacataactgaatccctcacagcaattattatgtatcaaattagatataaatggttttattttcaatacattttcttcatttaggataaatttatcccataacagccccagtattatttttacgggtaattttttatcatacgttccttttacgttttttaatttaggtacgatgtcaaccaacttatcattactagatagagaaacttctataatttcaatagaagggctatctaatgcttcaattgtctgatcagcccaatcaattatttcagtttttgaaaataaaccaatttgtaaccctatactcagaacctcagctattattttcatattatccatatataaaactccttagattttctggtaattatacatcgcagtaacctaaatttcaaaaggttgttgctagtatgcagtaactaaagggatttttaaacctaggatatctccacattgttagcaagataaaaaacaaaatctctcctaaaacgaaaaaaagatgaacaaaataataaaaaaggctcatttctatttcttttttagattccattccttagtaaaagaacttaatagatgaaaaggttagattgcacaattaattgggagatacgtacaagtaactttgaatctcttgaacaaatagttctaatttatcatatacagaaacagacataaaaaaaacatcctttcctatgattctacagaaagaatggcctgttttaatatttgtaggatagttttaaatacaaaaatatagaattgtgcaacttataaatgacttaatgtaaaatatatattgcatttatgttattaataatttaatatataaaatataagatttatggtatgaagttatgtttacaagtgaggtgtatttaatgtccgtaagtaaagtgaagtttgcaagggttgaaaaaggtctgacccaacaagggttggtcgatattgtaaatgttacacgacataacattagtattattgaaagtaataattataacccttctttaaacctttgcattcatacagctaaaacactagataaaagtttagataaattattttgggaggaattttaaaatggaaaaactaaaaaaatggttttcactcagtacacacccagatgaaagaattcaacaagtcgaaatgaaaatttgggctcaatctggaattattgtcctacttatagcttttgttgattttgtaataagaggagcatatctacaccgtccatttttagaatgggctgcttcattagccattataatttgttatatgatattcgtttttattaagtctattctaactggtgtctatgaaacggatattaataataaagaacaattaaaagaaaaattaaaagaaaaaatgaacaatacctttattttttgttttgtcgcaataggtgctaccacatacaaatataacttacctgaagatttcgttggatggttatcagtaatagcaagatttattatacttttcgctttcttatttggtattcaatatcttattacagtattagcatggaagaaatcaaataaaatttaataagtatagacaaaaaagcttatcttttagcacttaatgataagctttttattatttttttcatcttttttcgttttggtgtacaatgaatttcttagcttgatagcgatgggatagaaccacatcgccatcaagcggaaattttatagtaccccagaacaaaatttcgtgctaacttgtaacaaaaaaacatgtgaaattgcccatagataactatcttatattaattacataaactagtgtgtgatataataatataaagatattacatttaaagggggattcaaattggttaaaaacttacctttactaatagtgattttactacttggtataagttcttctacgttaagtacgaatggatacttttctccagttatagaagggtctttaatgattataagtattattttaaacattgctgcagtgataggtttatcactacacgttcttgtataccaacctatgaaaagatatgaaacaaatttaaaagagacatttaaataaaataattatattcgaggtaacaacccatcgttattgagctgaaaaatgtatccataaaaagaaaaaatacgctattctttctgtagaatcataggaaaggatggcgttttttattttagggagtattttgttctgttagcttgatggatgtgtggcggtaccctatcactatcgatttaaaagaatgactgccacgttttatgcaaatattaatttgttttgattgaaaatagattataaaattaatatttaaatataaagaatttgaatattagtatgttatcatttaaatgattcaaatatgtagtacaaagtcaatatttgtagctgagttcgtttatacatatgaaagaattaaattatgaaaaggcggtatttattatgaaagcaattaaattagcaggtttaacaattgcagcaggtttattattggcagcgtgtggtactgaagaagcgaaaatagagcaagacgttaagaaagaggaacaaaaagaaaaagttaaagcatttcaggcagaaaagcagcaagaagataggaaagtaactatgcaacaatcgacggataagtcaaaacagcatgaaaatgtagcaaaagaaacagttaaagaagaacaaaaagcggagtcaacgcctgttgaacaaccaaaagtcagcgggttaaatgaggcacaagcacaagaaaaagtggaacaatcgatgacagcacaaggccagggagcgcgtaataaagatgtgaaattaagccaattaggcatccaaacagcaaaggatggaataaaggtggctgcacaggcgcaagacgttcatattgaagcaaaagacagtctaactcgaattgttgttatcgttccagctggaacaacgaaagaaagagcgcaacaagtaggcaacatagcagcgcgccaagtggcaagttttggggctatgggattaaatgtagatttgaaagcaccatcaaaagactatttaggggaatattgggagaatttctctggtgatatcggtatctatgacagtaacgaaaaacaattagtacgtggatatatttccaagttaaatccaacaaaaattaaatggtaagaaaaacagagtccctacacaatgtatggggatttttccataaagaaaaaaacttaaggggtcttcggacgaatcgaattatcgtacagtaatgcatgttaattaataaaattaactatacaaataatttattatatatccatgtaatctagctgatataatatgtaagggaattattggttaattagtgatgtatatatgtaagattagggggatacataagtaaagttagatgctattttggcagttgtagaaatactcttcggtttttttgtatttataataactttatttgcttatcttttttcaacaggagaagaaaagcaacaagcaaaggaggatttaaaggagctttctaaaactgctctcatcccatttgtagtggttgtaatcgtaatattattttttgttgttaaggtgattgatcatgacaataaagttgaacaagaacaacaaaggctacatgaagagaactaccaatgttaccataatgatagtaattctaatcttgataaaaatctggaacaagatattaaataatatagataagaacctcgctatttctataagatggcgaggttcttacgcataaagaaaagacactctaaggtgccttttctaatagttttttagcagaagcaactgcatccgataatgattaatagtataaagagtacaacgagtagagcaaagcctccagcaaaaccgcagccctcgccgcaactaccaccatatcccataataatagttcctcctttagataagagaaaaagactagggggtcattccatgtgttttaatgggttcactttaccttatgtttttacgtatgaattgagcaggtccttttgaaaataagggagagatcatttaatgtgcttccccggaatattgattacctattttctaaaaaacaaactatttaattatatcaataataagatagattaatataatgtattaatcctaacagaagggaggattagccatgcaattagtttgttttaaattagtaaatggtcaatactttttagttgtagaaggtatcgaaattcctgcgccaattccagcgtttgctgcagctttattaattggtttaggagtaatcccactttgttcttaatttaaagaatttcaaacagctctatctttcaatcgataaccccttaagtatatgaatgcttgaggggtttttataataaaaaaagaaaagacgccataaggcgtccccacaattaggtagataagactttagttttccaatctaaagaaattttgtatcagttctttgaaaaaatatcataatatccaattgagttattatgcattattacattcttctctcaaaccttctagattctatttgataaaatagaatcctaatattactaaaaatcaaataaatgtttctaaaaaccctaaatatttataagggtaacaaaagtgatacatttaaggtgcaaattataaaaaatataaaaggagggtgaataaagcggtatttaaaaagggctattataaacggtgagcagttatacagtatatgaacctgaatcttgttaaaaaatgatactcatttgagtgtactttctgatttgaaccaacttgattaaaataatgaaaaatcatcatttgtttattctgatttctggaaaagttttaatagtttcatgctgaacaaacatactttttagaaagaggagagattattgatggataatcaattactatatcaacagcaaaaaagagaaaaggcacttgtgattggagctggtattgcaggcttacttactgcacgcgtgctttccagttattttgagacagtgatagttgttgaaaaagatgagttacctcaaaaaccatctgaacgtccaggtacaccccaagactttcatcctcatcgtgtattaccacgtggagaaataattatgaaccgtttctttcctggatatgttgatgatttattaaatttaggggcccataatgtcaagaatgataaaatgattcgattttctccgtatggggcactggaactagttatagaacgaaaaggtgcagcaagcagtcgagcattgttagaatggacaatccgccaacgtgtgcaagaaattcctaatgtacatttttattcaaagcaagcggtgacaggccttttagcttcgtctgatcacaagcgtgttattggaattcatattcaagaacgagacgaattaaaaacaaagcgaactgtgttaaccgatttggtagttgacacatgtggtcgtcaatctaaactcaataaatggcttacatctatgggctatgatgttccagaaccagaacgtttaaaggtgaattttggatatagcacgagatattataaagtaccttcacatatcaaagagaaattgagtgcaatttctgaaggagatcctgctaaaaacgttggagctgtagggttattatatattgaagataacatagctcaagcgctactatttgttgctggaggtatgcactatccaccaaccaattcaacagaatatgaaaaagaactggactcattagttacccctatgatgagggagttaattaaagagttagaaccaattagtgtcccaagaggatttagagcgcaggagtcaactcgtcaacattttgaacaaatggaaaattggccatctggattattagtgttaggtgatgctttttgtaactttgatcccatttatggacaggggatgaccgtagctgccattgaagctgaaatgttagatacttgtttaaaagaacattctactcataaacctggattcgaacgcaaggtgctgcaacgtatgcaacaagctattgagccggcatggtggctgagttcaattgcggatttacgttggaaaggtgttgaacatgtaggagctgttccactcaaaggtgtgaaatttgcacagaaatattttgctttatatcttaaacaagctgcaaagcaagcaaatgaaggtaattcatccatgctccaaaaatatataatgatgaatgggctagttcattcgcctcatgaaatcattaactcagatatgttaagaatgttaatcaatggagatgagtcttcagaagagaatgaacttttgaacgaacttggagaagtagataagaaaccaatgcaagaaagaatacatgaactaatcccttcctttacattagcttttgagaatagcgttccaaatctgttctcatccatttcaatttctaatgtcaaatgaggaaaagaaacattgctctaattagggcaatgtttcttttattagataagcagtatttaatcaactactttttcaattgttggcattatagcgattggtggtaaagagtaagtccaagcagcagcgtatacgtttaatttttcacctaatttgtagttttcaccattggatacaggtactcttaaaattttattttgggaaactagctcccaccaattattctgataataaagtgcttcttctttcgtaaaagtatcagcaacaattaagtaattatcgtctgctgaaataacatagcccgtgaaaggtatttgtattcgtacctgttcctccttaattggagaagtgttattggctgtatccgcagaagcaggtgttaagccaaaagtaaatccgcaccctaatgttaatgttgtaactactgttaataatttttgtttttttgaaaacataatagaaagcctccttaaattttattaccacaccaacacctttctattcatttagatataaagcctttctgcattcaaatatttaacaattttgtcataaataaaacaaaattgtatgtgatatgtattttttagagtgatttatgatataattcactaggtaaagtattttcgtggttcatctctatatagttttttaccctacttactctgtaaaatattattggtgaagagagaatgttttctctcttctttttttatttgacattaataatatcgttaataaagtatgtttaatattttttaggctattttgttgttggtaattagttttggtacgtataataaaatatggtttgattaagagatttagtcttgacgtacagaatttgcaaaatgttggtgttccgtctttatttacatcaaatgttaaatgtattctaattttaaatgaattcaacataatattttgtatctataatcccaaaggaaactttacatggaaatgaaatttttcctgcagaagcagcctgcatacaagaaattacccaagattccaattctaaaggcaagcggtatacttgaatattaccatcactgttttttacagttacaatcggtgtatttactctggttgtagcaaaatcgtccgttgttatcattcttactgcattattagtgtgaaaaccagtgtttataacttcataaatctgtccatctttctctttaataaccataggtatatttaaatagggatagtttttaatatcattatgaataattgctcctactgcattctttcttatttgaacctcttgcattcttttatgctcctttataatgatttaaacatgtttacgtaaatttattttattttacatctatatctaaagctattttgctcattaaagggttagggtcaattcctattgtgcattcgatctgtgtttttgcatatatttcacgtttaaatttcaacgcaaattgatagggatcgttagtaaataaatgaatgctatccgtaatatccatgaagaactcgtcgatggaatattggtgaaaatcctcaataggaacgtactgcaaagctaactttgttatgtaattagagcatttaatgtatgttcccataatcggatttataataagaatgtcttttcttcgaggaatctcgtataatctggccatcttctttactcccaattcttttaatgggggagtggcagctaatacgaaagaaccgtttctatttacatcaccgactactgccaattgtgtatacataggatctaaccccattttgatgcaacttatagaagcgtaaaagctacgtaaatcaacacataagatgattctattcggtaagatagaatagtcatacactgttattccttcctaaacaaaagaacgtttgttcttattatatacgagcttgtgttcttttataaagaggttttgttttaaaataattttttcagatattcttcttgtgggagcagcagttctaacaacaatcagtaatagggggcgtgacatatgtccatcaagctaaaattttaacatacccacaaaaagaaaatttttatctctctacaccaatttatgacaaatcatttttttcatttttaggataatgaatttcttaacttgatggcaatgacctaacattaaagtgtatgggtgatttctattaattaatatatcaaatttaataaatgtaaaattaaagcataggtgtatgataaacgtatgtaatatccttcattatgtcctaaatgtgccctggatttattagtatttttttgctaaaaccatactaaataaaggccgcaataaaaataaaggtaaaatgaacagaatatttaaaattatatatatcaacttatttaaaggttaatctaatgtaataccatgataccatggttttacattagatatagataattttggaaaaggggaagattctatgaatgttcaactagaaaatgaacaaataacaaaattattaaacgactggtatcaatccatgttaaaacaacaattagttaaagcaaaacaattaaaagagtatatagaaaatgaaattaacaatgtcaaggaaaatcaaaacgtactcttatattattctttattagattttagatacaaagcattaacagattggataagtattaacgaaagcagttttgatgaaatggataatttcacaactccagcagatgacttcctagcttattattatcacttctttaaagcattccattctactttaacatccaattacactgaagcaagtgaacactatgaaaaagctaaagaactattaatacacattcctgatccaatagaacatgctgaatttaattatcgaatggggtatttttattatcaaatctataaacaagtaatagctcttgattatataaaattagctaaagaagagtttttaaaacatgaaggttatgaaataaatgtagcactatgtgacaattttataggtctgtgttgtattgatttaaaacatttcgaattagctgaggagtcatttaataaggcactagacacattccaaaaaaataaccataaaaattctatccttatggtaagacataatttagcttggttatattcaaaacaaaatttatctaaactcgcgattcgtcatgtatctgaagtaacaaagaacaatccaaaccatttcaaagcatttttcgtagaagcatatgaatactataagataaatgaccataattacagcgatcaactaattcaaaaaggattaaaacttagtaacgattttaacaatcaagaattccaacatcgttttaaaattttaagagccctcaacaacaatgtccctacattaactttagaaatatttatttcagaaggtattacttatttcaaacaagaaaaactatgggaatgcgtaaaagaatatgctgatatcttagctctaaagttttatgaagaaaataaccataacaaagcaagtcaatatttttatatgagcaatacagctcaaaaaaatgaattagaaaaaggagcgttaaaataatgaaaaaaatctatctaactatacttggaatatctttaattagtatcctatcgttagggttaaacgactcttttaaaaatcaagctgtaaatataggagacggtggaggtgcaccagcaagaccagattatttattacaaacacacgctgacttataagaaaaaaacaccttcattcttgaaggtgtttttttataatctgatttttaaataaatgaaaaacggaatatatcaaagttctctaagttaacaacatattccaattattagaaaaatattaaaaattttaattttttgttctattatggaaatggtgaaaatgtaggggctttagacctaaattcaaaagatggaaaacttaatcagatgaaattattcactgatggaaaaagtgaatcaatcttaaaagaaaacaatgcaaaagcaggttactgggaagatgttcaacgttgtattaaaaacaactggaaaactatgcctcaatgggctaaatgggcttgcgaaggtgcatgtggtggttgtcttggatgtctagctggttacgcaattggttgcgctgctagtcaaatataaaaagaagggtgtgattcctcaaatggaaatgtctaaaggaatactgttttatagactaacattgattattgcttgtttggcagtagttgccttcacatatccatctgaattctctaaattcgcattaatcgcaggtattgttggtatttttatcattttagccaagaagactccttcctcaaggagcgtgaagggtcacagttcagtgagtaggtgggagatgaattgggttcgaacaagggatggcaggaagccatcttaattgttcgacatatagaaagtgttactccactacctatcgaatgtacgtttggtgtataatagtcatataccgaaatggaggtgaatcaaataatgatgaataaagcctataagtttcgtatctatccaaatcaggcacaagcaattctaatcaacaaaacgattgggtgttctcgctttgtattcaatcatttcctatccttatgggatcaagcatacaaagagacaggaaaaggcttgacctatggtacatgctctgccaaactacctgccatgaagaaagagcttgtttggctaaaagaagtggatagtattgcgattcagtcgtctgttcgcaaccttgcggatgcttatacacgctttttcaaaaaacaaaacagcgcaccgcgctttaaatctaagaagaacaacgtacaatcttataccacaaaacaaacaaatgaaaacattgccattatagggaacaaaataaagttaccgaaactaggccttgttcgatttgccaaaagtcgtgaagtagagggacgtattgtaaatgctacagttagacggaacccttctggtagatattttgtgtcacttcatttgtttgttttgtggtataagattgtacgttgttcttcttagatttaaagcgcggtgcgctgttttgttttttgaaaaagcgtgtataagcatccgcaaggttgcgaacagacgactgaatcgcaatactatccacttcttttagccaaacaagctctttcttcatggcaggtagtttggcagagcatgtaccataggtcaagccttttcctgtctctttgtatgcttgatcccataaggataggaaatgattgaatacaaagcgagaacacccaatcgttttgttgattagaattgcttgtgcctgatttggatagatacgaaacttataggctttattcatcattatttgattcacctccatttcggtatatgactattatacaccaaacgtacattcgataggtagtggagtaacactttctgtatgtcgaacaattaagatggcttcctgccatcccttgttcgaagccaattcatctcccacctactcactgggctgtgacccttcacgctcctagaggaaggagtcttcttggctaaaatgataaagtattctgctcgtagttaatacttagcaatattaaagagaaataccaatcatttacttgtgtaaatgattggtattctttacgttagccaatataattttaatttaaaacatggtaagcattcttcctcattcatcattgcaaaaaaataaaacgagaaagattagaatgcgaattcaggtgatgtttttatcatttactaatattcgagttcacttcaatgtgcttaagctttttattttttactctattagatataggggcctatcaataatttatttaaattagattatttaggcaccctcttccgaatcccacacttcaataatatcattgcattaattttctttcggaagtacaattcttttatacaattgaactgtaatcaagtagtaaattaagtaaatcactacgaaaatgacaagtggcaaccaaattcggaaatacggatcaatcaaaagcggaccgaacatgttcataccaactaatatatgagcaatacccacaattgccggtactaagaatatgaagaataactctttataaatcgattgtgttaataccccccggcggacaccaattttacgaagcatttgataacgtgtgctgtctttcgatgcgccagatagaattttaaacattaggcaacttgccatcattgctaagaacgcaattccaacgaagaagcccataaacatgaatccactggccataccatgactcagattatacatttgatacgtactacctaattcttccgctttcacatttttatatttcgctacctgtaattcatcaagttttttccattcttttaaatgtgctccaaaatcatctgttttcccaataaacacagtattttctttatccttcatactatcgtatatgctttggtctataatttttatttcatgatcaggatacatataacttggctggattgtgaagaaagcttctttccattgttttgttttcgtatcatcgttatacagtttatacagttgttttggcaatttaaatgcatccttaggaaattcctctgaaactttcatcatcttcctattttcactatcttgtgctaaaggacgatttttctctacatcttcttttatataatacacatactgatcatctactttgtagcgatattcaaacttctcttgaaataagattccactcaaaattttcttttcttccgctgttggattatgaacgactgaatcgtaaactttttctttatcagtcgtctttagaacgttatttttaaatgccataccacacgcaattccaccagcgccaagagccactaggatagctaccgttgcaagcacccgtgttaggctattaattcggaaattcaattgtgcaaaagtaaaagcattcagccctttttcacgacgttttttattactctttatcttgttaagcataactgggagaagtgatccaaataacatgtaagtaccgactgttgctgtgattaatccaatacccatgaatttaggtacagttaatagctcttttccctgtaaatgcgctatatggatcagtgatgcatacccaatacctagcaaaatcagaccaaggaatgcaactacacctgtcatttttccttttacagcgatacgctctgtttttgcatctgcatgtacaagttgtaatacagaaatacgagagaacttcatgctattcatgattgctgatactataaatagtgcaaagaaaaagaggcaagtaacagtcatagatggaatataaaatgctttataatcttcactagagaattccaactgcttcattaataactgaccaataccttctgcaagccctgtaccaactgcgattccaattgcaagagatacggcacctattacgattgtttcaataaacataagtaaggtaactttatacttttttgcccctaacatcatgtacataccaaattctttttggcgaattgataataagaaagaatttgcatataaaatatagaaaaacgttacaatcgctaatagaaaggaaccgatttggaatgcaattgcaaccgtattagcatgtggattggattcaaggaacgctttatttagtgctaatgtttgaaacatataaaaagttgaaatagatacaatcagaccaacaagtaagacaatgtaatcttgcaacttactttttaggcctgacatggaaagcttaaataacatgattgaacttccttccttacgctttttgtgtacctaagtttgcaagcacgtctaaaatttctttatagaactcttcacgtgtactaccgcgataaatttctttatatagctcaccatcttgaatgaataaaatacgttgacagtaacttgcgctgtaaggatcatgcgtaaccatcataatggatacaccttgctctttatttaagcttgtcatggcatcaagtaaactcgttgcatttttagaatctagagctccagtcggctcgtctcccaaaataattgctggttcatgaactaacgcacgtgctgctgcggaacgttgcttttgtccaccagatacttcagaaggatatttttgaagtatcgctgtaatccctaacatatcagctactttttctactttcggtccaatattacgtgatggaacaccttgaagagaaagcggaagtgcaatattttcataaatagataaattctccaataaattgaaatcttggaaaatgaatcctaacttttgtgaacggaaatcagaaagttcaccttgcttcattctcgtaatatccgttcctgcaatttcaacaacgccgcctgtcgctttatctaacgttgaaattacatttaataatgttgttttaccagaaccagaaggccccataataccaacaaactctccctcttgaattgagaatgatacaccttttaatgcgtgtgattgattctcaccttttttaccgtacaatttttgaatgttctttacatctacaaccggttttatcatttatatcctcctacatttttttatttcattacaataagctactaaatttgtttactactaacaaaatagacatgttacctccacccttaagctacaatgaaatctttccttttatcttcttcactcacctcatcactttgaatacacccatgataaactatgaaaattaggaaacaccccgtaaaatccttaagatttcttaagttttaaaaaaagcttatggaacctgtagttccataagctttctatctaattggatgttcaacaataaaagacatccaaccatctttatattctgcatgtatattaccatgatgaagttcaacaattctttttgaaatagcaagtcccagtccatttccctgatcaccttttcttgccttgtcccccctgaaaaacctttcaaacaatttatttggatcgctaacaggcggtctctcaactttatttgatactttcaaaattgccttgttacctattagttcaagacatatagataattcggatggtttcatgctgtactttatcgcattcataaacagattttcataaacacgtaccattttttctacgtctatgaaaataggtattgtttcttccgttattgatttttgaacgattagaccctccttttcaaatataggaatgtattctccaactatttgttctaacaaacctgataaatcaacttcattaaggtttaacttaacatcgatgcctgataaacgggtatattcaaacagttcatcaattaaatatttcaatctctttgattttaaataagtggtttcaaggtattcctgtaattgtgtgttactttcgtattgtcctctttttaataaatctatataaccaataatagatgtcaatggtgtgcgtaagtcatgagatatgttagttatgagttcattttttgtacgttctaatcgtctttcctgttcaaatgtattttccaattccttggacatatagttgatattttgaacaagttgggtcaattcgtccttccccttaatcccaatggtcaaacccagttttccattggcaatatcattcacattatcagaaatgagcttcaaatatgctattttctttcggaccaatatcaaaaaaatcactataaagttaaaaattgcgaacgagaataagaataacaatgataaattgaattcaaacataccaaactcttcgtgttttttaaataatggatctatgacgtatagcaccataaggattgttaaaccaaatgaaacaaaaaaactaactgcaacagcaccaagaagttttataatgatcttatttctgaaactaacattcttcatattttatacccaattccccagacagttttaatataaataggatgtttagaatcctcttcaattttgtctcttatttttgtaatatgcaccatgacggtattatctgatttataaaaaacttctttccaaactgcttcatatatttttgctacactcaggacaatccctttgttgcgggcgagtagttcgagaatagcaaactcttttggagttaaccttgtttcttttccccttacccatacttgacgagtatctgtattcacggtcaagtcaccaatttctagaatacttttattatgttctatggccgtattgtattttttaaaccttcttaattgggattttaccctagcaattaattctagtgggttaaacggttttgataaataatcgtctgcaccagaggctaggccctgaattttgtctatatcctcagattttgcagatagcataatgataggcatattgcgatcttccctaattttcatacatgcttcaatgccatccatattcggcatcataatatctaaaataatcaaatcaaattccttttcttctaacagttgtaaagcttctatagcatcttctgccttttgagtttttaggccttcattttcaagatatacagagataagatttctaatgtctttatcatcatcaacaataagaatatttgactccatatgattcctccacatttttttcgtattgaaaaactacagacataagcagttgaaacatttctatcttctcttttttataaacttgcaaacggaagatatgaaataacataatagatacaagtaatatcgtttccccctaatttaatgttcaatatttactgctgaaccatctacaatacatgagtttccttttgcttttaattaattttcccgtgaatacacctgtacttagtccatatttgacaatataatttactttttttcaaatcagcttcttcaatcaatttgtctccaagaaaccttgaactcggaagaggctacaccaactaatttttagttcattatatacaaaaataagaaagcgaattgttttcatgtttaattaccccactggtttgaattcataattatactctagagtccaaaccttaagaaaaaagggcaaaagttcttaagaattcttaagctttatacaacagtttgttcagaagaatatatggctactcttgaaatattcactattagcttctcattttgacactcccacggctaaagccgcaagtcctataacttacggtgtaacggatgggattcttgaatgactaagcattcgcagtccatttctgttttgaacagccttcaagatgagggtgtgccatcccccctcctaagacagaccttataggttcttaggctgattgactattaccgccaatcacagttgcgtagcgaatattcatcgccccaacgatatcaagatgtttctcaaacccacattggcacttgtattttctgtcttgcgccttgttttttccagaacatttcggacatgtttgacttgtataagaagggttcacatattcaacctttatgccaactaatgtcgctttgtactcgatgaattgtgctaaacgatggaatgaccaagtgtgtagatttttttcgtttttacggcttgttcgtgccgtctgtctaatgttcgttagttgctctaatcgaatgacagaaatattattatccgttgcaaaatcaacgattccacgacttactttgtggtcttggtcttgcatccatctttttaatttcaaatactagcgaagaaaagttagagaaaataattctctaacttttcttgtatacataactttattttaagaaagtaaaaaacttgtctcccaattatatgagattaaaatctaaacgattaaaactaatgaaatagatctttttaattacatacttaatttattttttaatgtccaatatttttctccattagcttcaaaagagaattctacccatccattcggatcttcacgataaataaagatggttgttccaggagttactgtaccaactttattctcctcgacagctacatctggtctacttttaatttttaaattaaatggataaggtacctggtagtaagcagctgatgatacaacatttgagcttgaaccgtctgcatacattttatatggaatttcattcgataacgcgtcgacatctaatgtttcaggattctttggtaatttttttgcatatgtatagtcttctacatgaaaaggtttaatacgttccataatacccgcaattttcttagcccagcctttatctgatgcatatttcacattcatgccagttaatgttgggccgttataatacataccactttcttctaaatatctttctcgtacataattagcgttataagcaatgctatcgccgtagcttggtaaatattttgcatatttaaacggatctccatcatatgcacgtagaccgaatagattatgtttttgatatgcgatttctgattttccgtatccagattctaaaatcgcatgcgctgctaaataatgagcactcacgccatattgattttgcgcattgataaaatcttgcccatgtccaactaaaggactatccgagtgatatttcgcaataaaactatcaatctcttgagctgtaattttcgaagccactgttaaatttaaatcttcatatgaggtagcagtaataacctctttttcatcgtttaaattttgttgtaacatatctgtttttgcagtaagttgagcagcttcagcacgtgttataaatctatttggttgccaaccgttctcggtaccattagaaatttttaaatctattaaaatattggcatatttttctccccaatgaccttttaaatcttcaaatctaacctgctcgttatgatttgctgtgctttgtagtttatatgcatttactagcatcgtagccatagcagcacgagttacttttccggatggattaaagattccgttaccttcccctttaacaataccagctttttcagcagcagcaatataagcagtagcccagtgattttgtgaatctgtaaaagatggttttgcattaggatcaatttgtatacctaaaacttttgtcataatttttgtagccgaagctctgtctaatgagtcactcgaaccaaaagttccatctggataaccattcaatacctgtttatcaactaaatagttaacggacttatcagcccatgtaggaacgtcagggaatttatgagtatctgctaaaacatttgaagaataggataatatagctcctgcaaggatacctgttgcaattaatttgtgcttcattaaaataaacacctctaccattgtatttatcaaattgagattttctatttttatatttacatgtttgtcataataatgaaatcgtattataatgtattcaatttgatgtaacgagtatagttacttatatacacaagtgtcaatgaatgtcttttgcaaaaatgtataatatttacatattttcgaatttcccctgatcttataattgacttatgcatatggtagatttaatagttaaatttcttttcgatagtgtaagtttcttgaatttaattattttttactctattagatataggggcatcttattagattatttagtccccctcttccgaatcccatacttcaataaattcaaaaccttttaattcactttgttcaataagagccttcaactcgtctgaaataaagacaaccgtcggatgaatttttccatttatgtaaactttaaaaatcatttcattttgaactatattaaaatcaaatgcgaacttttcacagcctactataaggcctgtaatcagttttttaaagattgctttatcaccatcaatcgcatctagtacattcaacacgtggaccaagtaatatacctcactagttgaattgcgtaagagtggtaaaaattcaacattatcacctattaaaggttcaagtacttgcttggctttttcactaatcattggagcaccagttcctccccaaaatttagggaaatcactatgaatatctccttcaatacactctatatatatatttccccatgaatttgctaaatgagttactgaatttatttttccatcaatatattttttgtgatcttcttcaaaatttaataactggaaagactcatagttatctaatacactctttaatacccatattttcatgcttattccccttaactattcttttatcttctaaagtaaaatagaatattacgtaacaaaaaatcgtttactactatttactttgtgattctaaaatatatcttgaatataaattaccatcactttctatacttattcataataaaaagcttatacaagtgcataagcttcttattttttactctattagatatggattcacattactaatctaattaaattagattaaatttctttacgcaccctcttctgaatcccacacttcagtaaattgaaaaccttttaattcactgtctaaaattgcatttttgaattgatctgatactaaaagatagttaggatgtaccttcccatttatattcaatttaaaaatcggttcgtgctggacaacataaggaataaatacaaattttttacatcctattattaaacctgaacttaacttatcaaagattgttttattagtatcaagtgcttccaacacccttaaaacatgcatagcatagtattttttgtttgtttgtttatgaattaatggtaaaaattcaatattatctcctactataggttctaaaacattcttggctttttcactaattatttgtacaccagactttccccaaaaaataggagaatcgcttgatttcccttcatctgttacctcaataaacttaggcgtccacgaatctgacaaacttaccatagaattaaaaccagttttaaaatattttttatcctcttcatagttcaataattgaaaggtttcataatcatcagtcgagctttttaattgccaaatcttcatatatattctcctttattattgccatttatatagttatttcttgggttcatttaatcgcaaattaccctctaataaatctcttcttatcccatgtaacacttcagctatatcagcttgagtaccacccatttctataacagaattcaatctttctgttacttctcttatatactcttttgagtggctacctatatgtaaaacttcagtagttacataatcatttattttatatggtaaaaacaccccattgaccgcagcatcataacttatccctatctcttgtaataattcctgagcttccacagccctaatatcattccaaggtactatgtgatgtgccgcattaggatatggaggtgtgtcaactcctgcatctttaagttctgcacgtaatttttgagatgctgtataagaatcaggatattcgtttttcacctctactctatcaagaaccttatctgcatattcctgaattacttcttgaacatctttaactttacttcttccactagttttggaaaacataaatgtttcacgagctttgcgtaaaacttcaaatgtttttatttgattgcttccaaatccacttgcacctgcaaatgccaaccgatccgtcagtggcaatttatttacgaaagaagacattcctgtagagaattttgctccttttgctaatgtagtgactttacttatccccttatcaccaataagtccaatttgtgtaaaagcataacttccccacttagcacgactttcagcgtctccatttattacatcattaataaacgaatctgataatgtgttccacatagcaggtaaggtttcatttaaatgcgtaaaagcgtaccccatgttctcccatgtttcccatttaccaagtgccacaacaccatctattgtatcttcaactgcttgacccgtaccttctaaaataccatctataattttttcagaagtagatttttcaggaggtttcttgcacaccgctccctcttccattgatccttcctttaaaagattatcaacttgacgttttctttcatcagcaatttcttggatcgaaacggtccaatccatatttaatccttgtgtactaaacgtaccacttacaggactaaatccttttccactttggacttcagcaaggccggcagtaaggctagctacaagttgaagagctgtgtggtagttattactggacgtatagttaaattcatatagatgctctaatttttcttgcagtttttttctcatctcgactaaaacaataaccatggcatctattccaggcaatactgtagcaatactaatcgcttctatacttgcgaccattcgattaatttcttgaatttgctctcttatttcttgttcgatgacatctgtggaagcaacttgtgattgaaaatcgcttggaaacgcatcattttgatgaatcaattcctcacataaataaataattccttgtgctaaaggacgaaaagtttggacaaaaaatatttttgcactactatatgtttgtccttgcaaaaccgtatcagttgcaaaggtatcaattgattggattgcttgctccatagcttggatagtagcgacacatacagcattcatgctttgggtctgattttgtacttcccctaaatacatatttaaactcatactttgtcctccctttttaatcgctgttgccgataggtaaggtcggtttctaaatcaataagattacgtctttctttaagtaatgtttctttttgattttccaattccaatgttaatttccgctcaatattttgcgactcttgaagcttattcataaaaaaatgagaaacatctttatcaccatgccatgtttctaaaatcctattaaataaacgattatttcgatttctcaattcgtgaaagtccatttctgcttgtctctggatttgaatctctgtttgatttcgatcctgtttttcaaatactatccgtaattcatgattaaattcatttatttgcttttccacatcttgactcatcttattcttcctacccttctccctttaccgtaggttgccacattagcgaaatgtcttttgtagttcgttatccattctttcaaaatccttagctactaaatgaatattatcaattgcttgttgaaaggcctcacaaaattgtctagttaaatctagcatttattgattcacttcttgcgcctgagcattaacagatagtgtagtacggctcgcctttgttatagaacgatttgtcgcaccttgaattgtatccgatgcatttttcatttgtgtagcaatttgtgtagctgtttgaaaattactttgaaagtttcccatcatttaaaccccttctagttccaaaatcatcaagaaaattataccatgtaagaatatttcaatgtatcaaatatttctagtaaggaattgatagctcttaatgataagaatgaagcttttcttaccgaatttcaattaaggatcgcttcaacagatgtagttgaactagaactattagaacaaattgaagagattaaccgaatcagaacaaatactgaagttacaaagcaagttattccactagcaggtatgggtgcaatgaggaacaaatatttttatggagtttggtttaggatggattggagataaaggagcaggcaaaattggaaaagtaacttcccttggagactctgtaaagttaacgaaattttcaggtgatacaccttatatttcaagccacttaccattaaaagatcgatttgcttttgctggtggagatggtttgcgctctagatttgacacaccaaactttaaacaagctgaagaaaaatgctctacctattaatttgctagtagtggaagaattaatagtagcagaactaatgatggcaatgttccgtatagttttgattcatcacttatggagcacctttttcatggggactaaaagctgttggatatcaccatgaaagtatgatgggtggaggagaaatagttagaattacccatgcaccaaattctgcgggagtatatagagcaaaagtaaaagtagacggtgaaacaaaaaatgcgctttcttcatttttccctaaggattgggatagagtacaggtacttgagtctatcaaagaagcatacgataataagattcaagtcgatacagttagatatgtaggacaaacatcccacggatttaaagtagaaatgattatacaaaataatgagataataacagcatatcctgtttatactaggaggtaaaaaatgaaatatacatacgaattttatcgtgatggacttggcggattaagaatacgtttgccaaaagaaatttctataatttctcatttcttggaagatattttagatgatgaagcagctgagtatatacaaattttagataatgtagtagaccaaaaagttccgcaatatgaaatagaagggaacgtagcagcagtctacattgaacctaattacaccagtgctattaacttatttatgagtgctccaaataaccaatgtaaaattgagacctctgaatttagaaaactacttgtgttgtggcgagatacagtggtagcagaagggaaagatatagaagtataaaagaaaactaccttctgtgatatttagatcatagatgctaaacttaataaaatcaaaggtaggaatatattaaatatatttctacctttttattatgtggcgagactccacatccattaacttaaaaattttttatttaacaggaattgtacttgcaggaatataaaagattttacaattaagatgctgcacttaatattgttaacaattatttttgcttatccctcattaaatgtaaactaccacccttaacctcccatgtttttccggtaaaagaataaaatgttaaaaacagttttaaaatgagtttctttttcaccttgtaagctgtagagctttcatatattccccttttctttcaagggccttttttgcatcctcagccgttaatgcaaaatctactgcaatgttctgtaataactccttattagcttacctgaagaaatctcttagttgttgatttgctaacctttcttgtttactatcaatcaataaaaaaagatttttttgttcaagggctactttacaatcttcagttgatggatgtgtgaacgtaccccctactaatattcttgcttttaaaccattactactgtattatatttacgtagtaatataaggattatggtatataaaaaaggaatcaaatctatcagtaagatttaaatccttttccaaggcaaaaagattttgccaaaatctaatataatttatgcttgtctttttaatatgtatctagtaaaaacatatttttttatcaatagaattctgttttcaatgctaggaattagtgttctaaacaaggaaccatacaaagtgatctgaaaaacctgagagttattgtatgtagtttgctcatctccaggtactacatacaataaaagagccttacatctctaggcaagactctactagtttagttgtataatatttacatgataactaagaaacagaaaacatataacaccaaatagcagcaccctattactcctcctacggctaatacctgcttaacccaactcttaaatttttgatttctgtaaatcgcttgcactctttccatatttcctcctattaagtagaacccttaaagactctccccccgctatagtaccattaaaaaatgaataatagagatctaatgtataagtatgcaatattgcatacaaaaatgtattgttataattgtaagcgcttactataatgagattataaagatttatcacatcttaatacgaaaaaagaggagagaataatatggaaatcgcaatggcagttttaaaatttataggtggagcaatcccattaattcaagaacttctaaaagcatttatgtaaattcactatttagcaattatttataaaaattatcatacaaatgatctgtatatcaaaaatgaattgatttacagatcatttgcgtgagcaagttcacctttaacatgactaagggacttttttaatttttaaatacttaaggttacgccacattaacatcaagttagcaaaacaaaaagaaaaatacgccacccttcctataattctacaaatggaatagcatatttttcatttttgggaccttaaaaaactttaacttgatggtgatggggtaacaattctgatttagagataagatcagtttatacaaagattacccaccgatatgtggaagatgaagaatacacttgcgaaattgaaacgattgaattaaaggacttgatgttagtgtggttaacagaatatgaaaatcacttaaaaaatcgtaatcttaactaaaaaacaccaagactgcccctctcctctctagggccatcttggtgttttttacgttcacatacaaattattatttgtactgttacatgggttctttattaaatgatatacgtctactttaccatcgataagcaatgactaatgtctcccatttaatcgtactgattacctatacgaggttttaaaggaaccatcttgactaaaatgataaaacaagaaatcgaaatgagccccttttttattttgtaatctgtaaagcttccattttaggcatcataatatcaacaatagctaaatcaatatgattttcttctagacactttaaggcaacttcaccatttgaagcctctacaacaaaaaaattttccatttctaaaaaaagctttaaaagatcaataatatctttgtcatcatcaacaattaatatattttttttcatactctccctctcatcagccggaattttcaaaaatcattttaaggttattgtaaggtaaatgaaagtgatacgaaagactaaccgtttaatatacgggtatgaattaaaaaaggaggcattatcacatgaaaaaatttgttggaattgcgttagcagctaccattggaattggaggtttaggaacttttgctactactaaaactcacgcagcagtaaacaatcaagaatcaaaaaaatcggtttatcaagtatctgacgtgcaaggtgaatttatgcacattaaagtggggaaaccttggtcaatgacgccaagcggaaaacaatacaaatatgtcttatttagtgaaaacaaaatttatgtaaatcctaaaactggtgtagtaacagcatatgaagaaggagcggttgaaggcagagtactcgataaaaatggaaatgttgttgctatttggtatatcacggcttataaatagtgaagggttaattttaaaaggtcgaaaagagcatctttaagtttattatgagagtattaaaagaatttcaatacttgtaattaccctaaaataaaaaaacttatcttttaacacgaaatgataagcttttttattattcttttcattttttgttttcggaagtatttctttaagttgatagtaatgcggtgttattccatcactatctacaactatatagtatcccaaaacgtaaacaacggattgcatttatataattaggttttggagaattgataattttgtttagggatactttacgattttaacttgaatgacatatagtgttatttttagcattctaaataatcgggttcaatgtatttttctgtttcaggagagcttttaatttctatagggtatttcttaaaagctacaacagtaatcctatcttcttgaactaaacttctggattcatttatagaagagaaacctgttcgcgttaaaaaattgtataaagaggattttgtcatccaaaaactagtaacgttatctaatgacgcccattttgattttaaacgttcttctattgatgagttagcagagtgttctagcattgtgtgtcccttatattcataatttttataaagtactgatacattaggagtacaagtgatatgagtatcaattattacaaaccttttgcatacttcatacactttttctaaaaaggggaatacatctgggcagtctaagtgatataaaataccagagcataaaacaatatcaaattgaccatatttttcagcacttaaatttcttacatcatcttgataaaaagttaagttttccaaccttaataaatctttagcgaatatagctttttgtatgtttgattctcttccttctatccctacaacagttgctccttgcatagcaaactcaatagcgtaatgcccctctaaacaagctaaatctaagattcgaagatttttaaaatcacattgtgtgatatcttgaatcattgtcacaattttttttaatgcaggatttggttgtcgaatatctcttgtatatagagtatccgttaatttaatatcataagcggtccattcaccatatttacgaataatgttttctttttcgagaacaaaatctttcatgatacaattcgccacctttagcataatattatgtgtaatatataccttaataagatcaatatatgtgtgtataacttgtatttagacgaaggtaaacattttaaagcttctcactttatcatgtggtacgtccacgattccttctttttgggagccactcgcaaatttagaacaatatgcagctcaaatagtcaactaattaaactacctattcatctcatctatctaaattatagaaaatcttattatattcatttttagccatagccagtgcaaatgtcataatgataagtgggacaccacattgctatcaagctaagcaaacaaaatactccttaaattgaactacccccactttcacttcgtttagaagtgagggattcctaagtaaagagttctatcgaactctaattgattaggctaaccccgcagtccttgcggttagaagccttatcgcttcattctttagattgatacttgcgttaatatccctatcatggtgtgtacgacaagaaggattcacgatccgttgtcgcatactctaaaatacaccccatcggacaagcaaatgcacatttcttctacatatttaaattggctttttggtacttccttatttcgttttccaaatcggtgataccccatcaccataaatatatttctctccgataatttcttacagatataccctgtaaaatagcctgcatcaagagctactgcttccactttaaatccgaatttatcaatttgagcttgtagacgcgctaaatatggctcggaatctgccatatttccagccgttaaataagtatctgtaataatattgtacttcgcatcagtcgtacgatggtctaaagaaatgaaaaccgttcggttttccatctctcattaaaaatccactatctggatccgtagtacttatacgagtttttttagtgggagtatcactttcctttctgggttttaattctttttttcgtgtacctcacgatcttcaattaccgcagcttctagttcgtctatgtaaaaattttccttttcttttttatatttatatacaaacttatttttattagcattggccttaatgtgcgtagaatctgtcatcagcgcacgtcctcccaccatccggtactctgtcgcttgcctcacaatctcatcaaaaatttcttagaaaatatttgtatgaataaagcgagtacgacgattccaactgattgtagaatgatctggaatagtatctgatagagaaaaccctaaaaaccaacggtaggcgatattcgttttaatctctttttccaattgacgctccgaacgaataccgtaagaatatccaataaacatcattttaaataaaacgataggatggattgacggacgtccattgttttcacagtaataagggcgtaacttcccttcaataaaatcaaaactaattgtcgcttcaatcgcacgaaggaaatgatcttgtggaaccaactcttctacagaaacagatacacgttcatcacgatgattttttaaagcacccatcataaaaagaggttcagacacaaaaacaggctgtggagaagactttctccacagcctgaagataaacgaaaaaaagttctactcctattgagtagaactttttttcgtttatctcggtaaataattaagtaactgtaatatttctcttttaaattttggagttgcttgttttagtaatgatggtacttctctaaagtgatttattagggctttgttaatttttgtagagtaatcttttttatctcctgtaagtatatctactatatctttttttaatggattactaactttcccccacaaaaattctgattcctgaaaatgcttattaataaaaattttgacttgattaataaaagggtcatttttttgctgtatagcgtcttgtaactgcaatattgatatgtcataattttgagttacttgtttttccttcacatgacttatattctcagccgcacttacacttgatccgaaagcacctaaaccactaaccccaattacacctgccaaagcaatacttgtacattgttttactaatgatttcgatttaataactttcataacgcttcccccatttataatttagattttcttacagttaaattttaccatgttttttcacctgattaactgttaaatgttacaataaaacgaattattataataattatatattcataaaataatgcaattaactttttcaattacatgtccatttttagcaagttgatacttttcgttatatcccttttactacgaccatttctctttgcacaaattcattcaaaagattggactgattacacctttacttttttaaacagagcgagaatataattaattgcatagcttttgaatgcaactgttaaacaaaataataagatgagtagactgacgcccattatttccacaataatacggacatccccctcttcaatcaaatttggtgcggtttttattgtacaaaactaatacacaattcccctatatttttcatataaatttccataagaaatctctcctgttcctctctttaacacacaaaaacaaattattccaaaaaaataaggatgtggaaaataccttctccacatccttgaaaaccgtagcttgatttcaaactacctctttaagttgaactatccccactttcacttcgtttagaagtgggggattcctaagtaaagggttctatcgaactctaattgattaggctatctccgcagtccttgcggttagaagccttatcgcttcatgctttagattgatacttgcgttaatatccctatcatgatgtgtttgacatgaagggcaaacccatgtacgtaggtttagattcttaacgtctttattttgatatccacaacaagaacatagttggctggaagcaaatgttttcgatacgacaatgacttgttttccgtaccattttgctttgtattctaacatggttcgaaactgtgaccaggatacttcactaattgcttttgctaacttatgattctttaacatattcgatacttgcaaatcctctataccgataacatcgtggtttttgatgatttcagttgaaattttgtccaagtaatcttttctagagtttgatatgtattcatgaattctagctacctttactcgttgtttattccaacgagaagatcctttcattcttctagaaaggacacgctgtgctttcgccaatttctcttctaatactcgaaaaaattctgggtttttataagttgttccatctgacataatggcgaaattttttagtcctacatccattccaatgtaagaacttgttttcggaagttcttgtacttctgtttcgactaacaatgatacaaagtatctgccagaaggattccgtctaactgtagcatttacaatacgtcccgttatttcacgacttttggcaaatcgaacaagacctagttttggcaattttattttgtttcctacaacggcaatgttttcatttgtttgttttgtggtatacgattgtacgttattcttcttatatctaaagcgcggggcgctgtttgttttttgaaaaagcgtgtatacgcatccgcaaggttgcgaacagacgactgaatcgcaatactgtccacttcttttagccaaacaaactctttcttcatggcaggaagcttggcagagcatgtaccatatgtcaaaccttttcctgtctctttaaatgcgtgatcccatagggataggaaatgattgaatacaaaacgagaacaacctatcgttttgttaattagaattgcttgtgcttgatttggatagatacgaaacttataggctttattaattatcatttaattcacctccatttcggtatatgactattatacaccaaacgtacattcgatggatagtgaagtaacaatttatgtatgtcgaacaattaagatggctccttgccatcccttgttcaaagccaattcatctcccacctactcacttcgcgttccttgaggaaggagtcttcttggctaaaatgataaagtctgtaaagcttaaacttagaccaaaaacaaacttaattatatctaaaaatcacctattttataaactcatcaccattattattaaattcaaaatataaccccaaaaatttttctaatatttccgatttattgtcttttcgccaagcaagtgacgcctcaatttcagtatttatatcctcaactttccgttgtattaatccatttaatggattaattgatgaaggtaataatgctacccccatcccatttgcgactaatgctgaaaccgtttgtagatcatttgcctggacggttattttcggtgcgaaaccaacattttgaaacaggttcataaacgtatcataataaaatggcgccgctgatctagttgccataataaaaggttcattttgcaaatcatgaatataaattgattgtttgagcgcaagaggatgtttttcaggaataatagccttaaatgacacctttttgactggccttacatgtattttactactacttattggtgcagctaaaattcctatatcaatttttttttcaattaaatttttaacttgaataggtgtactaagttgttgtaatacgattccaactttaggatatctttcccggtatctttgaatagtttggataagatcttgtactgatccactgaatcctattacaagttcaccttcagtcccggtagaagttaatcttgtgctgatgcatgcttgttcaacttgatcaaggatttgataagctttatccagaaatacctgcccagcattagttaactccacatgccgttttgtcctattaaataatttagcaccaatttcctcttctaattctttaatttgcttactaagaggtggttgggcaatatgtaatttttccgcagctcgactaaagttcagttcctctgcaagaaccagaaaatatcgaatgtgtcttaattccatttatcattcctcctccctagtacttatacctaaaaggtattaataagacactttttaggtatttctattaattattaattttgtttaatattaagtcaaggtaaaaacattactattagaatgggtgatagcataaattacttccaataagcagataacctattattagtttttgaacctaatcaaatgctttttattttaattacctctaaagttttgagataagtgaaaattttggttctttcattgcagcactttcctttaatctcttcctaatcccccacaaagttttaagcagtggtattagtggaattgcaatcattattggaattttaacaccctttaatactggatcagttaatttccttttaaatttacttatcataatattaggttatattagacttgaaaaaaattcatagggtatacaattttatcagttatcacattttcgacagcattatatgctattccaatacatgtagtgacaaacgacgtactcctttcttcattgtttggtggcgttattgctggtataggtattggacttgtattcaattgcaatgggtcaacaggtggatttgatattatcggtatattgctttcacgaaaaaaagatattcagcttggaaaattcctaatcgtacttaatactattgtcgttattatctctggatttttcttcaattgggatattgccttatacagtttagtatctatttttattacagggaaagtcatagatatgattcacacaaaacaccaaaaaattactctaatgattgtaacaactcatgtagaaaaaatgaaagaaaactttctttctaactttgcacatggggtaactttattaagtgagaaaggggcatactcaaatgaaaaaaaatatatattaatgactgtaatctcacgagtagagctagctagaataaaaactataatttctgaagtcgatccacatgcttttgtaaatattacagaatcaacagaggtattagggctatttagaaaaggataaattagaaaataaaagaaatgcgtataatcactttcaaaaattctgtacaatcactttcaacatttattagtaccgacctacattcttctctttaatatactaaccattgtttgtgtttatataaaaaccactttgaactactcaccacttaatattcttacagactttttgaagtgggagattcctgcgaacaccgatgtatccaccggttatcttagcaggctatgcccgtagtccctacggtgaaaacataagtatcttatacgttgactcaccacgcttcctactttagcttggttttcgcaacttcagtaaacgtggggcgaaagaacgttgaagattttacggttgcaacgtttttctacaaccaacctcatatcttcagttttcaaagagcaatctgtacaagtctatggtagcaaacatgttggcttataccaaccgacattcatctcccacctaaaattggtgtttcacaccttaacacttttgaggaaggagtcttctgtcggaaaacgataaaacattgagtatagttcagggatgattaggagaagatgtagtaagcgaaaaataatatagttttttatttaaataaattattaatttacttttaaattgaggatgataattatatgaaaaagaaaacggcattacttaattgcactattataaacggcgacatgaatcgagaaattgaaaaagatatggttattctagttaataatcttggtattatagaaaaaattgaaaaccgtcaaaatataattattcctaaggaatatgaacaaattgatataaaaaatcagtttgttatgcccggactcataaatgcacatgcacatttattttctgatggaagccctacaggactatcttttagtgaagaagtattaaattttggaattaagttattagatacaaaattaggaaagaaatttatttacaatagaatgaaaaaaaatgctctagtctcatttcaatctggtataactacacttcgctctgttggcgaatttttctatcaagatgtgaaattgcgtgatgatatacaaaatgaaaaattgattggtccagacctaatagtttccggtttctttattagtgccacaggtgggcatggggcaccatatttggccctagaaacagacggtccttgggagggtgtgaaaaatgtacgaaaaaatgtacgccaaggtgtagatttgatcaaaatttgtgtaacaggtggcgtcacagatgcaaagacaattggtgaagcaggaagaattcagttaaccgaagaagaagtatacgctatttgtaaagaagctcataaaattggcatgatggtagccgcacacgtagaaagtaccgaaggagttaggattgctttaaaaggtggtgtagatacaattgaacacggcgctacgatggatgaagaaatcatttctctttataagcaaaatccaaatgccttacgaggatatacgtcactgattccaacatttcaagctgcatacccctatacattactagacaggaacataacaaatatcaatgatgtactttttgaaaacgcaaaaatcgtgtatacaaatatgatgattagttttcaacaagcaattgataatgacattagtgtaggtgtaggaaatgatgcggcaatggcttatgtatcacactatgatctatggcgagaattggatcatatgattcgttttggtggcatcaatgaaaagaaagcacttcatttggttacaaagagtaattcagaaattttaggtattagtgaaaaagtaggtacgatagatgtaggaaaaaaagccaatttattagtattacctgatgatcctataaagaacatcaaaaatttatcaaaaataaatttagtaataaaaaatggtgttttatttgaggatttaaacataaaaaagaacgaaaaattggataatatattggatttaatttaaaaggattttcttttccttaaaaacaagatatcatatggatttcgttttccaaatttatgatattgtaaaataatatgtttcatcaaggagctgacgcttaaacatctaaacacaaatcgatcggtttgtcatgagagtggcgatgtcacaccaccaacttgcacgtcagcgataccagaaatggaattcgcctttgttagcaagaatcccaatgatgttagtcagcttgcccctttagggggaagtgtaaaatgtgcaatgtcagccacattaaataaaatatgttctcccatttttcatttaattattcttatatatattaatctaaaaatcttctccttatttctggcggaggtagttgacaagtatttcgttttccaaataacttatatcgatttttggagaatttatcatataaaaaattacgaataaactttggaattaataatagaaaaactgctagcttccaaggataatccaactctttacaaatatttattacagcatctgatttaatataatatttactatgtttaattaagactatactttctatgtttacatctatattatatcgttctagtaattctcttccgacatcccctctaagtgaggcgtattgaaagttaccaatagtgtctcttttaataataaattgtacgctttggttacaaaaattacactctccatcaaataatataatatttcccatataggtctcctttctgtatccaatacgacagtaaaattataaaattgacatcaatacagatttattatccgatacttcacctattcaaaactataaaaacagttgtcaactaaacatatgttaacaactgtttcatttattatctcaaccgacttaaactcatttgtattgtttgccaaaaattagaaattaaagatttacaacgatatcgtgtaccaataaatcattagataggttatcaccattcatagatttaccccatgtattaacagctgctgtagctaaatacactgcagcgccagcaacatatactgcacctgcagctacttgagccactactgcagcgtaataaattgcaactaatccaagaactgcacaacgcccagttccagtcccatcttcagccacttctaggctagccgatgaaacgcccatatctttagtaatatctgttaaaatttctccacctttatttaaggctttttcaattttttgaggattattagaataaaccgcagcttctaactctgctagataagaagcatctttttctttaacttttcccactaaatcattagcttgtttttccatctcaggagtatttgtagcttttcttaactccttagaatagaaattaggtaatttttctgccacttttccttgtccaaagaataatcctttaaataattcttcaccagaaaaaacttttacacttgcctctgttacagcggctttagcctgcatacttccttgaaacattacgcccattaaaagagcaaaactcatcaatgatgctacaattttcttcattttatttctccctttttatagaataagtcggtgataaccactattaagatacaaattttttcttatctaaaatgtccttttcacttttagtcttaagagaatttaactttgatataaatttaaattctctatttaatggataataggacaaaattaaacctgcacacataattatcgaaaagctatgtaatcctaaaactatagcaataccagcatgtaataacacacctgagtaaagatatattttccaatatttatttgaaccaattagagaagctgctaaaaacagttctataattgtagtaccccaagttatgaaaaaaacaaaaggtgatgccagtaatggatttataagattcgctaaggtgctattcaaccccagcataggatcactaaaatagtaatatactgctgttccatctagccattcaggattcttcaatctaataattgctgcttggaagtagatgaaagacatttgtatctttacagcaactaaaaagactaaagatattattctaaaatgcaattgagaattggatgttgtttcttttaaaccagtctcccaatgccattttctcttatctaataatgtgactgggattagtaacaaagtcagcacagttgcgacttgttcaccgccatcaagagttatagctgtattttgaattgaagacgcaacccaccaatgtaaaacacctgtgtaccttggtctccatccagaagcaactaatagtaaaatcaaaactgctaaccacttaaatagccctaaatatgaaccagaagctaggcaaaatatactaattgaataaattgagcatgctggaaattcttctacccccgcaacaggcctgaataatgtagaaacatcattaaaaattaaagtaactaaggtagataaggctattaacgacctggctactccataaacactagtccaaggattattagaaatcgcccaattataagcaaaactatttatttttttgaacatattgattccacctttacaaattccgaagacatttctgaaggcgatgtaattcctgcccaggcccaaggtactacttttcttgttactagtgtataatccccacataaaattggtttaggtgttggatttttgaccttcactctttcatgtgtttttttaacacatatatcaatatcttcgtcacatttattgaatttttctttttgtacttgtgccactagtaatcccatttcaatcccctgtgatctaccaccacgatttataccaaatgcatttttgatagtgttatttggccaacccacagcagattctccattctcatctaaaataaatgtataatcatcacgaggtggcttactaaaaaacccccatccttgtgggaaaattttcattacagtaaaactctttaaattacttataggatttttaggtaagctattttgagatcccatcagaaataaaataaaaataaaaattcctgttaaaacaagcgtagaaccgtataaccgtttcatatacccctccaaatttaataactataataagaacaattaattaagtagctaattaattaattgatacaacattgtaactcttttaatttttatatacagattatttgctacacactgaatgatatctttagacacaaaatttcacaaatttatcacaaatagtatattaattttataaaatattatgttttacaattactaagcctaatttccccacactaaacaaactgcatctaaaataaattacactattggatataatttccttggaagtatggtgatttaattcacatttttttaaaaattaatacattttttcataaaatccaaattatagttttctacgctattaattgtaaaattaatagccctttcatttcacaaaaaaagatgacctattattatagatcatcttttgagttctttatattattttacttgtaatcaactttgtatatttttattctcaattttcctaaaaaatatatatgaagaaaacacagatattaaagcagcaattgccacaagactaatcatacttaaaattacaaatttcggggttaaaattgataatagtattatcattaaacctgtaataaaaaagatttttgcagagaatcgattagttaatctccatacttccttattctttaatgtccaaggggttcttattccgtatatataattttgttctactcgctgcataaagttagataaaaccataatgaatataccagttgctatacccactactaattcaaaagtaatagtatatccaaactcagtacttacaattactaaatgaataatacataacaacattaacattgcattagaaatgattcttaaatcaagttgattttctaggtttccctcagttaataatgtatttttcactaatatattaaatattacatttgaaataagcattatcgtgggcataatgcttagaatccatatcttctcatcccctaatttaaaataagatatgaaacttaccactaaactaatcataataataagatatgaacatgtttttttcctcattatttattttcctccccgattttaatacttataagccaattcaaaatatcctgaacaacggttgtatttaatgtgtaatagacatacttcccttcttttcgatttttaactaaatttgattgtttcagaatgttaagatgttgagaaatactgggctttgacatattgaaatgagaagctatttctccggcagtaagatctctctcctttaacaaatctaatattttccttcttgttggatctgctaaagctttaaaaagatcattcaataaaaatcctccccccaataacatttaagtatttacttaaatgttatgtgtaagaataataaaaatcaagtaattattaaatttaatataacaatgtagtatttttacattcatggtgcataaatcttaaactattctttaacattgctatatctagactcctggtaccacaattgtaaaatattagttacatatttcacaattgtttttgacaaatatgaatacaattactaattcaatagaatatttgtgtctattgaattagtatgtataacttgaatcgtataaaagacattaaaaatatacaatcaaaagtaaatacaataaataaagtaatggaaatgaattattttcttgatattttgatacatttttataaaatgacataaatcaaaaaaagaattttcataaattctttttattcccttgttgtaagcgctttacatttatgataccatcgtatttataagatagatggtaataagtcttgaagtagttctttacttaagacgcgtgtaaacgtacggctaaatcataaaaataggccataggtccaataaaatatgggctatcttataaattaatcaatggaaatttcatcgctaaaaatactgtgaactcagatataacagctttttgttatgtccttaacaaagttttacaattcagcgggaaaattctcgaaatttaactcatccaatttaataagctaaattttattctgtatccagctacgagacgtgagcaaaagaattctaccaacaaaaccgagctaagtaattaaagatatctaaaattttatctttatactgtctatagttgataacgtatttccaaacaatctgaaaccttttttgatttttaaatgtataaacgaattacttaagacttatttacatagcctctgaatgaattcttcaaatatttatttggatataaatcattaatcattgcgtatggacttccattccaatatttcattaatggtgtccataacctatgactttttatccatctaattgtatatttttgtagtaattgttcatctgttaacttttctctttcttcaattgtccaccgtaatgcatctagtgctttttcctttgtccaaaaaccattaggagtcatcttaaattcccattccttaaattgattgggatataaatcattaatcattgcatacgggctatcctcccaacataattgacaagcgcctttcaatccagattgaattagccattttcccccgtaaatatttctcaattcttccagatctaatttttctttttcttcaattgtccattttaatgcttgtaatgctttttctttcgtccaaaatttattaggggatttagtaaattgccattccttaaatacattcggatataaatcattaatcatcgcatatggactcccatcccaaaatacccttaatggcgtacttagtttttgttccttcaaccacttttgcccataaattcgtaaaattttttttggtaataatttttctttttcttcaattgtccattttaataattgtaaagccttatttttcgtccaaaaatttaatggagtcattttgaattcccattccttaaattgattagggtataaatcattaatcattgcatacggactattttcatatctatgctgcaatactccacgtaatcgatattttgcaattaaagagacattccaattttgctttatctcttcttcgttccaatttaaaatttcggttaataaatatcttgttactcttttagccatttcattattctcatcccacctccaagtattggatgggaatctacttctttttccatccaatatctcctgatagatttcttctatagtaactgcttttatctgcatttcatactcttcccctcacactatataaaaatttttatttctttatattaagattatacaaatataaaaactaattacaataattacttatattaaaactataattcctaatgaggatgatcacatcaatatccagttaaaaaaatcataagttctttctccaaaattataggaaatgatgtctttatatcaccattttttgtatataataattagaactattctctcaagaaattcaaaacttattaactctaaattttttacaagctcttccaggagatatgaattttatgtaacaaaaccttaaatacctagccggggtttagtcgttttatatgtgtagactaaaacctcttcaatctaagtatgtagctgtttagaagtaccaacgatttaataccacatctatatactctttatacaaaggttagccaaagtaatataaaactaagtgaatctctttcccatacacctctaataccagcatatccatacctatatttttataattttcaagttccagatgcatacacatctactaatcctcatgataggagatgtagtcagtcctaaagctgtaataaaaatcccattagagtatgactaattaattgaaaatttttccggcgtgaaattcaaagaattatttatatctaactcttaaaataaacaaaaaaaaagatgagttatatattcttcatttaatatattttcgtttactcgaatttaagtctatctaaaataaagataaatattatttatcaatctttaaattaccaacaatatatataaatttgaaacagttatatttaaaacaaaatttgtacaatcgagtctaatatatatttgaaaaaccttttgaaacaattaaatgatatatataaggggcaacaagaaactacatactattagtaacttcttttcaaaagttttggacataatgatctcgtaaatcaatttgttttttgatcatgtgcatagcttcgatgccacttaaaattaaagtagctgtacgaagtaacttcaatcctaacatagaacgaactcgcttcttgataaaacgatgatcttgctccactacattattccagtacttctgttgtctaaattacataccgacaggcatgtttttctctttttctactgttcaattgctataggataagccggattcttatccaccgtaatgatgcgaggcttagaaacatgaaaaggccaaaaagctttcttgaagaaacgctttgcattctttgtatctcttgtttcactgaaatacaaatcaattgtgttgtattcagaatccactgcacgaatagatacatccattttgatatatgtttcatcgactctccgggagtcatttgttgtcttaaagtgactccatactctttcatcattccgacccatattgatgaacctacgcataatggttatatgagccatcgatatgccacgctctttcatcagctgcttaccaaaaatggtttgtatagaatgcgacattacacaatgatgtgtactcttaatttattcaccaatccgtgacttaattggattcatgacaaagatattatatgttcgtgcaatttcataaacgtgctgactatcataagcagcatctgcaacggaaacaacgcattttggttttgcataccttaaagcaatgcaggaaccattttacgttcgctgttgtaaatgcatacgacatctggtgtagaacagacatgagctttatatttcttataccaaccataacgagtagactattctttgtttgagaatcgtataaactcctccgtaaggccatactatcgattaaaacacagggaatcaaacctaaattcacctcttgaagagtttgtttatgaatcaatggaataccttcgttttgaaaccaagttacctacacgtgaaaaagtagagatacgaggaacaaaaggaaagtcacaaaatacaagaaataaaggatattgatgcaaaagacaggttaatttacgtaaagtttttctataaatgagtggacgacctgtaataggcggaacttctccaatgattaaactttctacatacgcaaataaaatttgtaaaatggatttttttgatcaaaattggttatcatactagtaaatacatcctttccagtgatagtttgggttactatcattcttccaggaaaacggatttttttatgcattcatttttggatatttatgagttctgcaacacctaaattttattaaatatcatgatttgcttaaaaatttgaagcgtgcgaaactagagcgtcgtttagaatcccaattgaaacaatatataaagtacaaattacttatcattgctgaaatcagatatttaccaattgatccggaggatgcaaaattatttttcaattcattgatatgcggtatgaaaagcgtagtaccatcttaaccacgaaagtaaatttcaaatcatgagacgaaatttttcaagatcctaccatgctaacaaccgtttcttacatcatgccacggttgttagcatggtagggtaatcgtatcgaattaaagatcattttagtaaagaaaatgattaaatttgtacacgcttaaacaagtgaaaatgtacattttaatccttacatttatataaaaaaattatgacaaataatttttttgtatataactcagcatttgactatgttaattaaacttaatattggtatatgagtccaaaaagaaaattaatctaattgcctaagactacttatgtacaattgtattatttactttagcaccttgaataagctctctttttatgattttgtaaaaggattccacaaatgcatcgtcataaagggttcttttctacagacacttgaaaaagcccattctttttgaatgtagtttgaaaatacaacttgtatattaagactcttggtctttatgaataattccccctttttcttcgacttaagggcctctactccttttggttgttgttgagtgcgtattttctaataagcccagatgaagaaatattaaaaataactgccgtttcgtttggaacggcttattttcaatcctataattgtgtgacacgttcctaactgaaaatgttaggcgctgattcgatattcagcagaactattatctaggtgccacggaaactgtcatgccctgttctaggagaggtagttagaaaaatgctaaacttttttagtaactcgctggctacttactctccctcacgtacggtgtaaagtgggggataagggggggataacgtcaaaaccttacctatcactattaatactatcttttatattctcacttccatctttgataatgtattacagcatttgtttttcttctagagtaaatttaattataaagaaactataaccccaattgttagactgtttttaacaattggggtgcatttaatatttattatacctctgtcattataatttattaatacaagtaattatttctcatttttccaataataccccattattttagctgacttcgcaaagaaatctatatatacctatttttttgaagaaaaagcttccatttttaatgtttttattccttcttttaatgtaaacgcatctgctcttaatgttttccaactatctttcgctgcattcaggttaggttttaagaatttaaatttattttgatctgctttttgggatgctttatcaatatgattaagcactcctgaatattgagaatctaaatcatgccattgtgctgacatataggtaagagcattaatagctgatccaattgcattttgcatttcagtaatattattatacgcaactccaactacacgatttaatgttattttatagtctacggtttggcgtaattgcactaataacggctctaacgtacctaaattatttcttgctacccctatcatcacacctccagcaatccatgtagggattgaaggatatgatacagttattattccatccgattctacttgtttaaaatgtcttatttgctctaaaacatcatttaggcgtttttcatcttcatctattccagatgcttgattttttaaaatcgattgcaagaaaataccctatagaatagacttttttcaagtgtctattctatagggtacattttatatgagcagcctctttttcttataattagaactggattttcttctctaagaaaccttttagttcgctaattggcatacgaacttgttccattgtgtcacggtcacgtactgtaacagctttgtcttcaactgagtcgaagtcgtatgtgatacagaatggtgtaccgatttcgtcttgacgacggtaacgtttaccgatagaaccagtttcatcaaagtctaccatgaagtctttagctaattctgcgaatacttcagtagcaccttcagatagctttttagataatggtaagatagctgctttgtatggtgctaaagcagggtggaaacgaagaactgtacgagaatcgttttctaattgctcttcttcatatgcatcacataagaatgctaatgttacgcggtctgcgcctaaagatggctcgatgcagtatggtacgtaacgctcattcgtttgtggatcgatatagttaaagtcttcgtttgagtgttccatgtgacgttttaagtcgaagtctgtacgagatgcaacgccccaaagttcgccccaaccgaatgggaatttgaattcaatgtcagttgttgcattactgtagtgagataactcttcttcaccgtggtcacgaagacgcatgctctcttcagacataccaagtgaaagtaaccagtttttacaagtttcacgccagaatgcgaaccactctaaatcttcaccaggcttacagaagaattcaagttccatttgttcaaattcacgtgtacggaatgtgaagttaccaggtgtgatttcgttacggaaactcttaccgatttggccgataccaaatggaagctttttacgcatagagcgttgaacgtttttgaagtttacgaaaataccttgtgctgtttcaggacgaaggaagatttcgtttgtgctagactctgtaacaccttggaatgttttgaacattaagttgaactgacggatttcagtaaattcttcactaccgcaatcaggacattttacttcatgttctttcattaagtcagccatttggtcgaaagtaagaccgtcaacaaccatttcgatgccttttgcatctaaagcatcctcaattaatttgtcagcacggtgacgagctttacattttttacagtcgatcattggatcgttgaagttaccaacgtgaccagaagcgatccaagttttagggttcattaaaatagctgcgtctaaaccaacgttgtgtggagattcttgaatgaattttttccaccaagcttttttaacattattttttaattcgattccaagtggaccgtaatcccaagtgtttgcaagaccaccgtaaatttcagaaccagggaaaacaaaaccgcgatgtttcgctaagtttacaacttgttccattgaatacataagaaaatcctccttttgaaagttaacgtattggcgatgacatactctgatactttggaaacgggcagtatatgttaaaaagaacataaaaaaacgctcatcccaaggcttatttgcctagggacgagcgtttgcccgcggttccaccctagttgatacacaaaaggtgcatccactttatcatgtattgctcaggactgccgtttccttgcggcttcaggctttcactatccctgaatcgctttttatgcaagtacttataagtccgtcatcgctacttatattaataataatgaacatattctaacacgttcttttttaaatctcaatagaggaacgcgtctatctatgatagagtctcgcctattttttcgttatttattcggtaattttgtttaatatgcttaattgcttcgcgcttacttaatggagcgagctcattgttttgcacgtattcccaaactacatccggatttgtttttgcatattcacgaaggacccagccaattgctttttgaatgaaaaattcttttgaagaatgtagttgtccaataatccagaaaagaagttcttcatccatcttttgtttatatttgagttggaataaaatagtggcacgttgtaaccaaatgttatctgatgcaatccattttgggatataggcagaaatcaattctggatgttgtaaaaagatattacctaaaaatgtaggtacgatgctatcgacagtgtcccaccaagattttgttacaatcaattcttctaagaaggggatatgtgtttcgtttatatgctttttatatttttgcataatatcaagtgcagccgcttggaattcacgttctggtaagtcccaaagttcacgtacgataatttggaagtctcttttatctgggagagtatgtatttgaatgatgtcttttaataattggtgtctttccggtgtttgaatacctagaaatgggaagtgatttttcatataacgagccataggttctgctttttcaagattttgatgagctgtaaaatgctcttgtaatgcttttacaaatggatgcatacgtgtttctcctctcttattctctttcttctcttattatacaaagagtttggataaattttaaaacataacttgcaatgtaatgaaatatgttgaaagtagagaggagaggataagatggaggatcaaggcgtactagcaggtttctttgctcttagttttgcgtttattcttgttatattgatttgggcaattatttcatatttgttaacggcttttgcactttattcgatggcgaaaaatgatggtgcaacggacggggtgcttgcgtttattccgtttttgaatagtaagacgtggggggacttagcgaaagataaattaccagattttttgaaagaagaagcagggtggaaagtattcggcatatatgttgcatgtttcatttttaatttcgtaccaattataagtttactagcaacagctgtatcgattgtattgtccatttatcttatctacgctattttagacagatacggaacgaactctatattatttacgattattcatgtaatcacattttcggtgttcttaccgattcacttatttattattcgaaatgaaccggtgagatataaagagtagatttttcatttttgttgataagtagctataagtaaaaaagcgccctgattatcagagcgctttttctactacataaggtagcgtaaataaatataaatgtgagaaatgattaatgaaacgatcataattgggaaaccgacttttaggaagtccatgtaactaaatttatgtccttcgcggctcgcgatacctgcaacgattacgttagcagaagctccgattaatgttccgtttccgcccagacaagcacctagtgctaatgcccaccataatacatcgatttgtgcgtcagatggtgataagcctagcccaactgccatatcgttaataagtggaatcattgttgcgacgaatgggatgttatcaattgttgcagaggcgataccagatacccataaaataaggatggatgcgtaagaaatatctccgcctgttataccaattactttttgagctaacattttgataagaccgatatcgataagtcctccaacaagtacgaataaccctgcgaagaagaagattgttacccactctacgcttgcaaatacttcttcaatttcatgctctttcacaccaattaacataagtacagtagcaccagttaaggcgataatagcggcatcgatatggaaaatagaatgagtcatgaaacctacaattgtaagtccaagtaccgttaaagattttttcattaatactgggtctttaatgtattgtttttcatctaagctcattaattttttaacttgtacaggatcggcaattaattgtttgcgatacatgaagtaaagtattatcgctgtaactgcaataataataattacaataggtgctagattcaataggaaagcattgaagtctaaatgcttatttgcagaaccaatcataatgttaggtggatcaccaattaatgttgctgttcctccaatgtttgaaaaaataatttcagaaagtaaataaggaacaggatttacttgcagtatgcgcgtaatagataaagtaactggaacaacaagaagtacagttgtaacgttatctaaaaatgcggagccaagcgcggtaagtaaggaaagtgaaattaaaattttaattggatttccttgtgccccttttgctgctttaatggcaacgtattggaagacacctgatttactcgtaatgttcaccaaaatcatcataccgatgagtagcgtaatcgttccccattcaatatgtttcgtaaaggcgttatgtaaatcgacgacccccacaattaccatgagtgctgcaccaagaagtgcgatgacagcgcgattaattttttcagaaataataatggcatatgtaattaaaaagactgcgatagcaaaataatactgccagttagcgagttcttgcgttgtttcgtgcaaaaatctcatctcctttcattcactttttcttagtgtgtcaaaaatgctctagaagaaacacacataacgtcattataaagtaggaaaatggcggatgtaaatgaaaggagagattttgtcatattttctgcataggtcattttttcttattttttaaaatatttgtgggcatttgacatatatataagatacatccaatctgaatatttaaaatggaattagcattcgagcttgttcgtgtaggagtgtcaaatagaaaggaatgacaaaaatgataaggaagggatcgtatggatgaacaacgatttttatttttagactttgagtttacgatgccccagcatagaaagaaaccgaaaggattttttccagagattattgaggtaggactcgtttcagttgctggctgtaaggtagaagatacgtattcatcacatgttaggccgaaaacatttccctctttaacggatcgatgtaagaagtttttaggaataaaacaagaagtcgtggataaagggatttcatttcctgaactcgttaagaagctttcagaatacgaaacgaaatgtaaaccgacaattgtaacgtggggaaatatggatatgaaagtgctgaagcataattgtgaaatggcagggatagcttttccattcttcggacagtgtcgtgatttatctcttgagtataagaagttttttggagaaagaaatcaaacaggattatggaaagcaattgaggcgtatggaaaagtagggacagggaagcatcattgtgcgcttgatgatgcaatgacgacgtacaacatttttaaactagtagaaaaagataaagagtatttagtaaaaccagcacctccaacattaggagaacttgttgatttttcaaaagtgttaaagaaagtgagcacacagtaacgaccaaattgcacattatgtaatttggtcgttttgttttttagagtttgtagtctttctttaactgttctaatgtttctagactacgctctgcaaaaggtgaatcatcttcagaaaatgaattcatttgagtttctaatgctaattttagtgaatctgtataatccggaatttctccttcatatttcttcaccatttgttctggaatgttcgtttgctcacgaaaagctaaagcacgtctttcgtggaaaaatggtacgtcagcttgttttacgttatgtaagtcaccttgcaccggatgttttaaaacagctaatgcttttacgacgtaactgccagggcggctatttgtaacctcaccaatgtattttcctgttttataaataccagtaacgatttcaccaatttcaaatgtttctctcatatttttcacctcaagtttatagtaaggaaagtgagggaaggagtcaaagaaatccttcgttttcagaacgccccttgagaatatggggaggttgcactataatttaaaataatataacagaaaattctgatgttttataaatcctataataaggagtgttctatatgatgcctttatattttccggaagataaaacagaatatattattccggggattgtttgcgttctatttattatcggtgctattgccacgtggcgcatgtttattcgtatatcaaaaagagaagcagaccgattacagaaagttgaagaaaaactattagctgaaaagaaacagtaactcatttttgtatgtttccttctatgctcggacaatctaagggcagaatatattttggagggaataaaatgaaaaaacggctttttttcagttgttgtttactatttctgatggcaggttgtgaccaaggaaagccgaaagaaattgacgtgaaattacataatgcttcaggtgatgaagtggggactgcgaaagtaactcagcaaacaagcggagtgaaaattaagattaaaggggaaggtttcacgccaggcccgcacggcatacatgtgcacgaaattggtgagtgtaaagcaccacgatttgaatcatctgggaatcattttaatcctgataataaaaagcatggactccttaatccgaagggtgcagaaaacggtgatttaccgaacgtagttgcagatggttctggaaagattaaagcagaaatcgatgcacctcacattacacttgaagaagggaaaacgacgattcatagaaaagatggagcgtctattattattacagaaaaccctgatgatggtatgacacaaccgacaggtaaatcaggggatcgaattgcttgtggcgtaattgtaaaaaaagcatcggatatgaagaaaaagtaaaagctaccgtgaatggtagctttctttgtgaaatgtaattgaaaatatatcagcgattattggaatatatcgactgtaactcaaattatatcggcgattattggaatatatcgactgtaacttgaaatatatcgatttaccgacaaaatatgacaaaggagtctgccccaagaatgattcgggacagactcctttcttattatgaaaacgtatgacgcagtctgtttaaaatttcttctaaaacagatcgtggacagccgatgttaattcgaatatgttcttcgccacctaacccgtatttctcaccaggttcaacgatgatttttcctttttcctcaagtagtgcggtacgctcgttttgagaaagctttagacgagaacaatcaatccataataaaaagctaccttctggcttcgttacggaaagagcaggtatgtgagttttaatatattcacaagcaaattgagcattatcttctatatataatcgaatttcgtttagccaatcattacattctgtataggcgctttgcatcgctgtataagcgaagatatttaacccgtggaagccttgtctatactggatggctgtaaaggcatgacggagcttttcgtttggaatgataatgatcgacgcttgtaatccagcgatattaaatgttttacttggagccatgcaagtgatagtgcgctctgctaattcttcagataaggaagcgaacggtgtatgtgtatggtctgcataaatgatatcggaatgaatttcatctgccacaacgattacgtcatatttagtacataacgatccgagctgcacaagttcctctttcgtccaaacgcgtccgattgggttatgagggctacaaagaagcaagagtttgatgccttgctgaaactgcttttctaaatgcttgaagtctatcacatatgtatcattttgtttctgtaatggactcacgcataactgcctgttgtttgttgtgaccatttcgaaaaatggaggataaataggtggttgtacgagaacagattcgttttctttgatgaaagcctgtatgctcgtactaagagctggaacgattccggcgctaaagacaatccattctttttgaatatcccagttgtattgttgttttgtccagttacaaataatatctccaatattttcgggaggaagtgtatagccaaaaatcggatgttcgattcgttgttttaaggcagtttgaattggttttggtacttcaaaatccatatcagcaatccaagcatggataagttcttcgtttttatatgtatcccattttatactatgcgttccacgtcgattgattgctttatgaaatagttgcataagtttgctcccttcttctgtaaaaccaataagttatgaaagttctctctcttcttatagaatagctgatgtgataggataaagaaaagtattaaaaagtgaaaaggcgggaagcgaatgggtacatatgaaaagatgatagaggttgtgaagaattgggatccgtttcaaatgggaccggagttttatgaaacagaagcgagcgatgttgtgagcgtcataagtgtgtttgacgatccaaaatatatcgcaaagaagattcaacatatatactttatgtcttttgaggaagtacctgcgcttgaaaaatgtgagaaattagctgtggaattacttgtaataaaagaaggcggaagctgttcattataggctgtcgggatttccgacagccttttttatattatcccgctatctgctgggtagtaagaccttcacctcaaaatttagcggaagcaaagaagttaggtggaggctgattaaagtttcattttattgcgcggaaaaagcgataatttcttcataaacatgttcaggcttttcttcaggtagtaaatgtcctgtattttcgtaagaaataaattttgaattcggtaaatctttgtgtagacgatgacctacatgtacagggacgacgcggtctttttcaccccaaatgagtaggataggtgtttcgattttttgtaattcagttgaagataagtcaccttcacggtctcgtatcatgcgagttaaagcgggaaatatacggtcgtcataaaaaggagcggagtaaccttttttcatttcatcgtcaattaatgagtgatcatgaacgacattcattaagttatgaacaatgccgcgccttataatccagttctttacgtataaatgaaagaacggtaaataagaagagtatagtaaaggtaaggttgcgcgcgctaaatagctcgagctacatagtaaaatcgtctttgaaatgagttcaggacgtatacggtttacatagagagaaatttgcccacccatagaatgcccaactaatacaatgtttgagagagataaatgttcaattaaatcaataataatcgttgctaaattgtgataagaatacttaaacagatgagacttatcactttttccgaacggtggcaaatcaagagcaatgactgttccttccttcgatagtaaaggaattagacggcggtaactgaatgaggaagataaaaagccgtgaacgagtatgaaagtaggacgttctgttttattatcatgttcatacaattcgtaatgaacagtagtgccgcgagtggaaaaagtgaaataaggacaagtatatttatgattcattttttgtcactccattgatttttgttcatatcatctccaaggaagaagaaaatatgttaacaaaaaaaggcaagatgacgatgtcatcttgcctttcgtttattcagtattacccgcgaacaatattaggcggtgtttttccttgtaaccctgcaactaaattttcagcggcggtcatggccatttgctgacgagtttttaatgttgcagatccgatatgtggtaaagtcacaacattttgtaatgataagagtggattatctttttgaatcggctcttgtgtaaatgtatcgatacctgctgcaaagattttcttttctgttaaagcatggattaacgctttttcatctactgttttgccgcgagaagcattaatgaagattgctgtgtctttcattaatgaaaattccttttctccgataaggtgatatgtttcatctgttaatggagtaagaagaacaataaagtcagactgattcagtagcgtctgtaaatcacaatatgtagcatcgaatttttgttcagcttcttctttacgacggcggttatagtaaagaacattcatatcaaatccgaattttgctcgttttgcaacggcttctccaattcggcccataccgataataccaattgtgctatggtgtacatctagtccgaagtgttcttttccgatttcagcgttccattcaccatttttcacgtaagaatcgagttcgcaaacgcggcgcccagctgatagcataagggcgaaaacgagatcagctactgtatcatctaatacgtatggtgtatttgttccgataacatttcggtttttcatcgcttgtaaatcaaaattatcgtaaccgacagaaatgttgctcactacttttaagttaggagctactgtcagtaattcttcattaatagcagatccgaaatttaataacccatctttatcttgtattttctctaatagaatatcacgaggtactttctcattttgatcccatttttcataatcacagtgttctgataaatagttttctacaaatgttggaactggttcagcaatataaacttttggtttcacggttccatcccctttcgctttatcccgcatttttccgctgattaaagtttcactttattttgacataattcaatagaaaaatcttcttttcaaacttgaaagggtatttgtataatttagacacaaacgaaaaggaaggatgatttatatggtgacagaaaaagaattagaattattagcttgtcttgaaaagagtagtcgattatctgtagatacattagcgaagctgttaaatatagaagtagaagaagtaaagaagatggttgcgagattagaaaatgaaaagattattgtggattatgtaacacatatcgattggacgaaagtgaaagaacatacaggtttaacggcaatgatcgatgtgaaagttacgccaaagcatggcgttggatttgatgcggttgctgagcaaatttatcgttattcagaagtgaaatccgtttatttaatgtcagggacatatgatctttctattacattagaagggaaaacgatgggggaagtagcgatgtttgtttctgagaaattagcaacaattgaatctgtcgtttctacaactactcatttcattttgaagaagtataaacatgagggtgttatttatgaaaaagacgatgatgataagcgaattgtggtgacaccatgaagcaatttgaactatctagatcagcagaatctttaaaaccatctggtattcgaaaattttttgatttagcagcaaatatgaaaggtgttatctccctcggggtaggagagccagattttgttaccccttggaatgtaaggcaagcatgtattcgttctttggaacaagggtatacgtcatatacagcaaatgcaggattattagagctccgtcaagaaatagcaaagtatctaaaaaaacaatttgcagtatcttatgacccaagtgatgaaatcattgttacagttggagcgagccaggcgttagatgtagcgatgcgcgccattataaatcctgatgatgaagtgctcattattgaaccaagcttcgtttcttatgcaccacttgtgacattagctggaggagttccggttcctgtggcgactactttagaaaacgagtttaaagtactaccagaacagattgaagcagttattacagcgaaaacaaaggcgattttgctttgttcaccaaataacccgacaggtgcaatgctaaataaatccgagcttgaagaaatagcagtgattgttgagaagtacaatctaattgtattatctgatgaaatttatgcagagcttgtatacgacgaagtatatacaagtttcgcgagtattaaaaatatgcgtgagcatacgattttaatttcgggattttcaaaagggtttgcgatgacaggatggcgtctcggtatgattgcagctcctgttcaattttcagaattaatgctcaaaatccatcagtattcaatgatgtgtgcaccgacgatgtctcagtttgcagcacttgaggcgttacgcgcagggaacgatgaagtgattcgaatgagagatagttataagaagcgtcgtaacttcatgacgaaatctttcaatgaaatgggcttaacgtgtcatgtgccaggcggagcattttatgttttcccttctatatcttcaacaggattatcttcagcggaatttgcagaacagttattgctggaagaaaaagtggctgttgtccctggtaccgtatttggcgaaagtggtgaaggttttattcgttgttcttatgcaacatcgcttgaacaacttatggaagcaatgaagagaatggaacggtttgtagagaataaaaaaaggacaaaacgtaatacgttttgtccataaaagggggggaatactagaaagccatgtgttagtagtctatcccaatattggataattatacttctttaagggaaatttttcatgaattttgaatgagttctgtcatagtggtataatttactaatataaggtatacgcattctagataacgttatctagaatgcgtactaaccaatcggatatttaaaataaatatatctgctttgctctctataattgtagagagaatggtaaacgtatgggagtgtttcatatgtcagaacaatatacaacaggagtggttgtaacagggaaagtgactggaattcaagattacggtgcgtttgtagcgttagatgcagaaacacaagggcttgtgcatatatctgaaattacaaatggatatgtaaaggatattcatgactttttaaaggtcggcgatacagtagaagtaaaggtactttcaattgatgaagagcacagaaaaatgagtttatcgttaaaagcggcgaaaagaaaacaaggaaggattcttataccgaacccatctgaaaacggatttaatacgctgcgagaaaagttggcagaatggattgaagagtccgagttaacaaagtaaaagaggaacgcatatgagcgttcctcttttactttatcttatgatatatatttgcaaatatgattgcatgcaatcatattcgtatgtcggaggtgaaaggacatactgattatcgaatttcgtttgtttctgggtgcgtaccaagattttcagatggtttaaacagtaaaccaaggttgataagcccagatataccaacgatgccgtaaataatacgtgcaagagctgaattttgtccaccgaaaatggctgctactaagtcaaactggaaaaacccgattagtccccagttcacagcgccaattacagtaaagactaatgcgatacgttgtaaagtactcatgaaaaagccccccttaattgtgaagcatgagcaagcgatgagttaattaactcttttatagaatggggtagttatgttgtttttatacataaaaaatgtttgaaagaagatgtatatacatctataccgaaaaatgcgaatttttatgcaaaaaatgaactttttctaaaaaatatatattggttacgtttacaatgtttgaatcgcttgatttacaacttcagtttcgctaaagtgaatacagaaatacatatccataattggagggaaaaagatgagtacacatgtaacgttcgactattctaaagcgttatccttcatcggtgaacatgaaatcacttatttacgtgatgcagtgaaagtaacacatcacgcaatccacgaaaaaactggagctgggaacgatttccttgggtgggtagaccttccgcttcaatatgacaaagaagaatttgctcgcattcaaaaatgcgcagaaaaaattaaaaatgactctgacattttacttgttgtaggtatcggtggttcttacttaggagcacgtgcagcaatcgaaatgttaaaccattctttctacaacacgctttctaaagaacaacgtaaaactccacaagtgctatttgttggacaaaacattagctccacttacatgaaagatttaatggacgtattagaaggtaaagacttctctattaacgttatttccaaatcaggtacaacaacagagccagcactagcattccgtatcttccgtaagttattagaagaaaagtatggaaaagaagaagctcgcaaacgtatttatgcaactacagataaagcgcgtggtgcattaaaaacattagctgataacgaaggttacgaaacatttgttattccagatgatgttggaggtcgtttctctgtattaacgccagttggtttattaccaatcgcagtaagtggcttaaatattgaagagatgatgaaaggtgcagctgctggtcgtgatgacttcggaacatcagaactagaagaaaatccagcttaccaatatgcagtagttcgtaacgctttatacaataaaggaaaaacaattgaaatgcttgttaactatgaaccagcacttcaatacttcgctgagtggtggaaacagttatttggtgaaagtgaaggaaaagatcaaaaaggtattttcccatcttcagcaaacttctcaactgatttacactcattaggtcaatacgttcaagaaggtcgtcgtgacttatttgaaacagtccttaaagtaggcaaatctacacatgaactaacaatcgaatcagaagaaaacgatttagacggattaaactaccttgctggtgaaactgtagacttcgtaaacacaaaagcatacgaaggtacattacttgcacatagcgacgggggagtaccaaacttaatcgtcaatattcctgaattaaatgagtacacattcggttaccttgtatacttcttcgaaaaagcatgtgcgatgagcggctacttattaggcgtgaatccatttgaccaacctggagtagaagcatataagaaaaacatgtttgctttacttggtaaaccaggatttgaagaattaaaagcagaattagaagagcgtttaaaataataaaaagcgaccggattccggtcgctttttattattttatcgaaaagtccatcagtatattcaaactaaagtgggtatgctaaaggaaaagtctaggagggatgggcttgattccgattcaatcaaatttagaaggacgtacatatgcgttatataaattagaagagattatgaaaccacttggatatagcattggtggtaattgggattatgataaaggatgcttcgattacaaaatcgatgaagaagatgggtatcaatttttacgagtgccatttacagccattgatggagaactagatgtaccaggcgtaatagttcgtcttggaacgccgtatattctttcgcacgtatatcaagacgaactagatgataatgtgaatactttaacagctggaacaagtggaatggatcaatttgctgagccgaaagatccagatggagatgtgaaaagaaaatatatcaatattgggaaagtgctcatgcaagaattagagcgtcattttactaatggtgaataacaatgagtatgtcgctttcaatgagaacaaaggaatgaactggattaatcatatattgttcgtcgcgctttatacctagtaagagaatgttttgctttaaaagagtatagctacaattggcaaaagtttgtccggtgcaggacgatggaagcttcatcagttgtaatttattatcagagatttcgtcgtaaagtgaaaatagtacacctgaaatggaagggaataaaagagaagcggtaaatacatagctcgttaatttatttccttctataatttctgacgcgccagctctcgttgcattttgtatttgttcagaagtaagaagttcagcgatgcagtgaatgtttgggttgagcccttttgcagttaaaatatttaaaatggactgtgtatccgctaagctttcatttttttctttatccgctgttattaatatggtgtgtgccgttgcaatattagcctttaataaagtttgatcgtgatgcggacaaccttttataaattctaaatgatgaaatggttttggaagtaaagaaagtgtttcatcaattaaaacgatatcaaggtttggttgtaatacgtgcatttgctttacaacatgttttgcgcgctcattccagccaacgataatcatatgaccgttagaagtagcggcttcttcacctttaattttcatatattgtttactaatcatctcggtagcaaacagcaccatataataagaacaaaagccagttcctaataaaataatacttatacctattagttttcctatcgtcgtatggggagcaaagtcgccatatccaactgtaaaaatggtaacgattgaccaccaaattccgtcaaaccatgtagtgaaatgaaaaggttctaatctatgtataagaaaaccggaaaaagcagtcagtacaataataaaacaaattaaacgaaaaataatggaatcacgaaatgtatctactaaattcggacgggatttcaattgcctattcctccttactttgtaggactacattcattgttgccattatagaaaaaagaaaaactctctaattaaagagagtttgttttacgttacatactttccacttcagtttgttggacactttcaagatgctggagagcatagtaaacatcagcggtatgtcttttttgatcaatggacagtttaagatgtaaatagtgagaaccgttttctaatgttttaagcttcatattcttaacttttatatccatttcttttatttcttcaattacgattgggatattgtccatatttcgtacaacaagtttcacagcgatatcacgttgacgaaatgatctagggcctacatatttcattgcgagtggtataagttcgacactaatcataaggaaacacattccgaatatcgcttcaatatagaatccggccccaacagcaataccaataccagaagcaccccagatcatagcggcagtcgtgagccctgcaatgctatcgttgcctcttcttaaaattacgccagcacctaaaaaaccaattcctgatacaatttgagcggcaagtcgaagtggatccatattcatatgatcggtatgtggtaagttataagctgctttaatagaaacaatcgttaggaggcaactaataatagaaataactaaacacgtttttaaaccaagtggtttccgttttaattcgcgttctaaaccaatggcaaatcctaaaatagccgagagacctagtttgattaataaatcggtatagtccatatatattcctccttgtatgatatgctatatgaataaaacgcttattatagaaagaaacgtcttttgatagagtaactttatataaaatatatgtaggaattgctcatacatgaaagagatatttcgtttaagtatatgatataaaaaaagaaatgtgggcagttttaaaaaaagtttataaaaggtgttgcatttcatttttcaccatgatatattaataaccgtcgctgatgcggaaacgcagaaaacgacaaaaaagaaattgaaaaacttagttgacatcgaaaaacgaagatgttaacataaggaagtcgcaaatgagcgaccaagtagttctttgaaaactgaacgaaacaaacaacgtgaaacgtcaatttttattttagatgctagacaaactaaaaagctaaagaagaagaaaaagcaagagaaatagcaaaagctaaagaagaagagaaggcaagagaaatagcaaaagctaaagaagaagagaaggcaagagaaatagcaaaagctaaagaagaagaaaaagcaagagaaatagcaaaagctaaagaagaagagagagcgaaagaagcatctaaaaacaacatacagtctgctaaacgtgaattaacggtagtagcgacagcgtatactgctgatccaagtgaaaatggtacatatggtggacgcgttttaactgcgatggggcatgatttaacggcaaatccgaatatgagaattatcgcagttgacccgaaaataatcccattaggatctaaagtatgggtagaaggttatggagaagctatcgctggtgatactggaagtgcaattaaaggtaatcgtattgatgttttaatgggttcaaaaagtaaagctatgaattggggaagacaaactgttaaagtgaaaattttatagtaacaataattatccaaatagaagtcagttctctttattgaggctggcttttatttttttagtagaaggataataggatttttaaatggcttattactaaacctgtaacaaaacataaaaattaattctctgttttgatttaaaagatgggagacttgctgaacttaaaagtaatgaactaaatattttaccattcgtttcatgcttgaactgcgcgatggtgtgggaaccgcaatattttcagttaagtgatggaggtaaaacagttcaaatcatacagcagcaaaatatagaagaatggataatggaagaggaatataagttaccagtttcattaccaaaaacaacggtaaagcttataaatatgaaaaatgaagatatacctatagatgaagatagttactgggaagcttttgacttgttcggttctgaatatgtatgtagattattaggggtaccgttatatgatgatcttccaaaggatttggcgtgtccaacttgtgcgaaagagatgaaatatgttgctacaattactcaagatattgaggaacgtggacttatttcagtagttaatttccagtttggggaaatgaatatatactattatttatgtatagattgtttaattataaaaactgaaatacaaaatacataacaagcctaacatattatgttaggcttgttttttgatcgcaacatcattaagaattgcatcaaatatatctttttgcgtaaagttatctgtaaaaatagtttctctggcaaccttaatagtatcgtgcggattataccatttttgtagggaatcttcaccaaattcgtgtcgtttgtcccttttgttatgtcgtctaatagtttcctctaatgataaatcaaagtaatatgcaaatgcattttcatcaaaataacgaattaattcttttaacatctcaccatacctatgactgttcaatataccttctaaaataacaaattcacattttccttttccgtacttcgtaatttcaaatagtaaatcatgtgataaattacccattgtgtcgtgtactctaagcatatctctacgtacaatatcctgtgatactaaaagtgtcccttgtccgaaatgttcttgtagttgttttgcaatcgttgttttaccacttgcggagtttcctctaagaatgattaaagtggatgtaaatataggattagacataatgtattccccccaaacagcattaattatatagaaaattttaacaaataaagtgaggaaagtgtataatcaatatgatggatatttaaggagggggtaagatgggggatatattaaaaaatgcacaacctatatggaaacggacttggtttcgttatctaggggcattttttattgttcagttactgtttattttgtgtgaaataactgggtgggtaccaaactttaggccaggcggagagttttttaatagaatattaaattctcaatttttcactgaatggttcacactctatacaatcccgcaatttaacgtatttacagcattttttgcgattacattactaccatatgcattagtaggtgcaatgaaagatgtaacagcaagaaaaaatataaaggaataatagaggtataatatgctttttcaaaaagaaggtttattgattagatacgtaatggaagatgatgcatctatcatttctaaatggttaacggacccagaagtcctgcggtattacgaaggacgagataatccgcaatctgtagaaaaggtgcttgatcattttatacatagtccaaacagtaatgaaaaaagatgtttaatagaatttgataccattccgattggttacatacaaatgtatccagtggattcagagtggaaagcgttatatggctataaagaatcacaaaatgtatgggggatggaccaatttatcggtgaaccagcctattggggaaagggaattggaacaaaactcgttcaggcagcaattacatatattatgggtgaaatgggagcagaagcaattgcaatggatccgaaagtaaataatgaacgggcaataaagtgttatgaaaaaagtggatttaaaaaagtaaagattttaaaggaacatgagttgcatgaggggaaattagaagattgttggatgatggaatataaacaataataatggcttatacaaacaaagggggatgtgtgaaatgaaaaaagcattaatcgtaattgatgtgcaagcgggtatgtatacagctggaatgccagtacataatgggggaaagtttttacaaacactgcaagagcttattagggaatgtcgttcaaatgatattccagttatttatatccaacataacggtcctaaagaccatccgttagaaaaaggtacggatggatggcgaatccatgcggccatcgctccgcaagaaggagataatatagttgaaaagacgactccagattcattccataatacaaacttaagcgaagtgttacaagagaaaggaattgaacacgttattctttcgggaatgcaaacagagtattgtgtagatacgacaacgcgcagagcatgtagtgaaggatataaagtaacgttagtgagtgatgcacatagtacatttaatacagaagtgttacgtgctgaagatattgtgaaacatcataacgcagtattgggagcgtttgcggatgttgttgaagtaaaagacttaaaagtggctgcctctaaataagaggcagttttcattagaaaaaatagcgtcaaatattgttagtaggtcggtattttgaaataatcacttatataatttcacgtaccataatgaaaaaatacaaaaaaggagcaccacataattaaaaagggcgctcctgcattaaaacgttacttttttttatctttatccaatatattttgttcttcagcaaactctgtaccatatgcaaagcggcgattaatacgaatgttatcattgttgtgccttgtatgagagttagagaagcgatgaacgattacttcagataaagtgaagacgatggcagaaaggatactgccccatgcaatttgcatatagttgtctaataaaatattaccgaaaatccatacgcttaaatatgttaataagaaatccgacataatggcaccagtattgccaattcgatttaaaatgattttatcaacgaacatgtaggatacgattgtaacaaagagactgaatgaaataatttgaacaaacgttgcagggaaaaataaagcaagcccaatgctaaatgcgataatgcacgatataaacttgataagcactactgtgaaatcattcaaaatttacacctccgatttatacatagtttttcaataaattctggagttcatacattgtaacggatttatttacataaaactttttcatgttcggaatttagtctaaatattataaaaacaatgaaaaaatgttatagtaaaatgagagtgtatgacatttttaggtaagggggaatccaggatgtggattacttcagaagtagaaattccagatgagttaattgatcaccttgagcaaggaaagttagtattatttgttggagcgggagtttctatgaaagggaaatcaaacttaccgaattttgatgatttagttgatgaaattgcaaaaacgttatatgtcgaaaaacgtgaaataacagaaccacatgattattatcttggtaaaattgcgaaaacaaaagatgtacatcaagtcgcaagagatcttgttcatatagagaaatcaaaaccgaatccattgcattatgcaattccaaggctatttcctttagatacagatatccgcattgtaacaacaaattttgatcaacattttacaacagcaattaaagaaataaatagagatatcaatgtttattacgctccagctttaccgactgggagagcttttaaaggtcttgcttatatacatggtaatgtagaacaggagaaagaggctttaattttaacagatggtgattttggaagggcttacttaacggaagggtgggcgagaagatttttagttgatctattctcaaattacaccgttttattcattggatatagtcataatgacccagtaatgaaatatttagcaactggtttaccaccaagtacaagacgatttgcttttgtcgcacaaggagaaaatacgtaccactgggaacatttagggataagaccaattgtgtatccgaataaggtgaataatcatcaatccctcgtaaaagcagtaaaacgctgggctgaattaatgggtgataattatattacgaaaagaatgcgtattcgggatattgtaacggttcccccgtcagtagaacaggaacaattatcatacataaagcaatcgattaaaaaaattgaaacagtacgttactttgtggaatttgctcatgattatgaatgggtcgaatggttagaagcagaaggtaaattacaaaatttgtttatgcttacgctaaactataatgaagtagatgaattacttgcagaatggttagtggaacaatttctttttagtcatcagaaagaattatttcaattaatttataaaaactattctaaaatatcaccgttattatggagaacaatttgtaactacttaaacgaaacgaagagtaagatggacccgctgttgtttgcaaggtggacactccttttattagaaacagctgaaaaagatagtagctctatagaaaagatttctaagttactgcaaaaatgttcttttcctgagcataaagaaattgccttattgttactaacttttattttagacggaaaactgaagttgaaacgtgtaagaaaatgggggaatgatacgcaagaatcaatagaactcgaggaatcgagtcgcttaccagtatctacattttctcatgtggagcaaatttggaacgaaaagatgaggccatatatcgcttattatgctgttccaattatgatgattggattagaaaaattgagaatgttgtcgttaagacaaacggcactgaaaaaaagaaataaggaaaatgtagagaaagagtttcatcaaaatgatcttgcatttttaatacgaattgtaaaagagtgtctaacttatttatgcgaaaacaatgaaaaaaaagcggattattatattacagaaatgatagaagcaaatagtgtacttaaaaagcgaattgcaattgatgcgatgaataaaaatatttttgttcgtgtagatgacaaaatgaaatggttgttacatgaaggacttcttttagatttcacttataaacacgaagtttttcaacttttaaaaaggcattatgcatattgtttagaaaaaacaaaagaagaagtcactcgaactgtaataaagcatcttacagaagagagggtatttgatgcatgtctcgtattagacttattattcaagtgtgattcgaatagcccatctacggcaaatgggtatgagttaatgaagcaaaagcatcctcattttcattctgaacgatacagtgtacaaaagaaagaagatacagcagaaagcattacttgtaatgtaactgctgacggattattgcagctgaaagatgttgaaattatgaagcaagttcagcaattttcgcaagatggtgtttttgaacaacgccattttttagagatgttatcaaaagcatgtaaattaaacacagagtggagtatttcatttgcataccaattagtaggagtgcaagaaataagtaatgaagtatggtttgtttgtattagagaatggcgaaataatcgaggattgacgaatgagcaaatccaaaaaattattccgctattgcagaaatttgttagaaatactgcttttcattggttaattagtagttttctatatgaaattagtaatcgactagaagagttagaagagaatagtatacgtgttgtaaaacgatttgctttttcagtgttccctcaagttatgaagagtgatgcagactttaagcttgggaaacaagatttttataatgaatcaattcagcatccagttggaaaaatgacggctgtattattaaagttgttatcatatgatcatttatacgatcgtaatgtatatgaatatttatttttatttgaagaacaagtaagagttaattcggaacgaacaaactttatgtttgctcgtttaatagcagatattacatttctatatcatattgaaaaacaatggtgccgaaaatatttgttaccatacttagatttaaaaaaacaaaatgagattacggaatatgcatgggccggcttatgttacacgcaaataaatttacctttatttacagaaatgaagcgatttattaagtatgcgatagaacatttggaagtattacatccgcatacgagagaagctttcttgaagtggcttagctttgtatttattaaatgtgtactatattgggagcaaaaaacaaattggttatacccgttactcatactagaaaatgaagaaaataaaattaagtttatgcagtttttatgctattacgtcaaaacattaagtgtaaaagaacaacaaaagttttggacagcttggctcagtgtatttttgcgagaacgaccaaaaatgggtgagataactgcgagagaatatgtgatgcttttacgtattattttatacatggatgaaatattagaaaaaggattatgtattatgtctcgtgcattttcaagtgtacaaggtaaatgtacaggtgaggaaatgaagcggttattgattgaaatgcttcataaaaaagaaagtatgaaagcgcataaagaaatgtttgcaaatgtgttttttattttactacaaacatgtcacgaagccgttttatttgaaaaagaaatcatacaaataaaagaattattagttcagtatgaagtagaggaatatgttttacatttactagaaaatgaaataattcgcataggaattgtaatgggtgatttacaaaaagaattatagaacgaaagtggaatttaaaaaaatatataaaaagttgttgacagtgttttgaaaagcgttctataatacgaatcatacttattcaatttcaaaaacatttgaataaacaaagtgcaatgaagagatcacagtagtggttagtcttactgtaacagagagctggtggttggtgtgaaccagtacagggataatcatgaattacagtcttggagcatctttttcgtaataaagatagtttgtctttatgaggaaaaagcggtcaattgatcgttaacagtgaagagaggtagacggaaagttagtctacaactagggtggtaccgcgataaatatcgtccctactgatttattcagtagggactttttgtattttagtggttcaacttgaaaattaaatagtcatgcattgaaaggaaaagcagtagttgttgtttccctgtaacagagagctggtggttggtgcaaaccagtacataaacaagagcgaattacagtcctggagcatctttttcgtagtaaagatagtattgtctttatgaagggaaagacggtcagatgatcgttaacaatgaagagaggtagacgaaagaagtctacaactagggtggtaccgcgataaatatcgtccctactgattgaatcagtagggcttttttgtacaaaaaagtgggtttttaactagtagttcatgtctttgtacgaattattagtttaaaataagaagaggtatcgattccactataaatttgtataattagtcagttcagaaaatagagaattttttattctcttactatacttttaaaacattagaggaggatttccaaatggcaaatcatgaattagatcaattacgtaaacaggtagatgaaattaacttacaactattacaccttttaaacaaacgtggtgaaattgttcaaaaaattggagagcaaaagcaagtacaaggcacgaaacgctttgatccagtacgtgagcgtgaagtacttgatatgattgcagagcataacgaaggaccattcgaaacatcaacagttcaacatattttcaaaacgattttcaaagcaagcttagagttacaagaagatgataaccgtaaagcgttactagtatcacgtaaaaagaaacaagaaaatacaattgttgatgtaaaaggtgaattgattggaaacggaacacaaacgttcatcatgggaccttgtgcagtagaaagtttagaacaagttcgtcaagtagggcaagcgatgaaagaccaaggcttaaaattaatgcgcggtggtgcattcaaaccgagaacttctccatatgatttccaaggtttaggagtagaaggacttcaaattttacgtcaagtagcagacgagtttgacttagcaattattagtgaaattttaaatccgaacgatgttgaaatggcattagactacgttgatgtaattcaagttggcgcacgtaacatgcaaaacttcgatttattacgagctgtaggtaaagttaacacaccagtattattaaaacgtggattagcagcaacaattgatgagttcattaacgcagcggaatacatcattgcgcaaggtaacgatcaaattattctttgtgagcgcggtatccgcacatacgaaagagcaacacgtaacacattagacatttctgcagtaccaattttaaagaaagaaacacatttaccagttatcgttgatgtaacacattcaactggacgcagagatttattattaccaacagcgaaagcggcacttgcaattggcgcagatgcagtaatggctgaagttcatccagatccagcagttgcattatcagattctgcacaacaaatggacattccagaattccatagattcatggatgagttaaaaggtttcaaaaataaattatcttaattccatatcatatatgcattgaagaggaaacagtagtgcttatctcactgttaaagagagctgatggtcggtgtgaatcagtacaaaggtaagcatgaattacagccttggagcatctttcccgacaacttttggagggtaagacggtcgaacgatcgttaaagaagaagagaggtagacgaaagaagtctacaactagggtggtaccgcgataaacatcgtccctactgagcgctcagtagggacttttttgtacaaaaaaatagtaaaggggcaagagaaatgagatacattacagctggagaatcacatggaccgcagttaacagttattttagaaggtgtaccagcaggtttgacacttacggcggaacatattaataaagaattattaagaagacaaaaaggtcatggacgcggaagacgtatgcaaattgaaacagatacagttgaaattgtaagtggtgttcgtcacgggatgacacttggatcaccgattacgttaattgtaaaaaatgatgatttcaaacattggacgaaagtaatgggtgcagagccaatttcggaaaaagaaagtaaagacatgaaacgtacaattacaaaaccacgtcccggacatgcagatttaaatggagcaattaaatatggtcatcgtgatataagaaacgtattagagcggtcatctgcaagagaaacgacagttcgtgtagctgctggtgcagttgcaaaacaaattttaagcgaattaggcgtgggaattgcaggacatgttcttgaaattggtggagtaaaagcaaaacatatttcaaacttatcaattgaagaaattcaaacaattactgaaaactcaccagttcgatgtttagataaagaagtagagcaagaaatgatgaatgcgattgacaacgcaaaaagtagtggagattcaatcggtggtattgtggaagtcattgcagaaggtatgccgattggcgttggtagttacgttcattacgatcgtaaattagatgcaaaacttgctggtgcaattatgagtataaatgcatttaaaggtgctgaaatcggcgtaggttttgaagcggcacgacaaccaggaagcaaagtgcatgatgaaattctgtgggatgaaaaaaaaggatacacgagaaaaacgaataatgccggcggtttagaaggcggtatgacaacaggtatgccaattatcgtaagaggcgtgatgaagccaattcctactttatacaaaccgttagcaagcgttgatattgatacgaaagaagcattccaagcgagtattgaaagatctgatagttgcgcagtaccagcagcgggtgtagtagctgaatctgttgtggcatgggaacttgcagatgcactagtcgaacaattcggaaaagatcgtatggaattattaaaacaaaacattatgcaacacaataactacgcaaaagaattttaataaaaaggtgggtttaacgtgcaagtaaaagatcaactatcatcattacaaccatataaaccaggtaaatcaccagaacaaatgaaagaagtgtacggagatcattcgtttgtgaaattagcatcgaatgaaaatccatttggttgttcaccgagagttttagaagagttgcaaaactcttggttggaacatgctttatatcctgacggaggtgctacaacgctccgtcaaacaatcgcagataagttgcatgtgcaaatggaacaagtactttgtggtagtggtttagatgaaatcattcaaataataagccgcgccgtattacgagcgggagataacattgtaacagcaggtgcaacattcccgcagtaccgccatcatgcgattattgaagggtgtgaagtgaaagaaattcctttaaataaaggtgtatacgatttagacgaaatttcgtcagcggtaaataataatacgaaaatcgtatggatttgtaatccaaacaacccgacgggcacatatgtgaatgagcaaaaattaactcgatttattgaaggcattagtgaaaatacgttaattgtcattgatgaagcgtactatgaatacgtaacagcaaaagatttccctgagacattaccgcttttagaaaaacataaaaacattcttgtacttagaacgttttctaaagcatacggattagcttctttccgcgttggatatgcgatcggacaggaagagctaattgagaaattaaatgtcgtacgtttaccatttaacgtatcttcattagcgcaaaaagcagcgacgattgcttttggtgatgacgagtttattaaagaaatagttcacatgaatacagaaggattacagcaatacgagagtttctgtaaggaaaacggtataccattttattcgtcacaaactaatttcatcttcttaccggtagataatgctggagagatttatgaagcttgtgcacatgcaggatttattattcgtccgttcccgaatggtgtccgtattacagttggaacaagggagcaaaatgaaggggtgatttcagtgttaaaacaacactttgaaaataaaaaaaataagtctcgagatgaggcaaatgcgtaaaaaggtagtattaattggaacaggtttaataggaggctctctcgcattagcaattaagaaagagcacgatgtaacgataacagggtacgatatatttaaagagcaagtagagcgtgcaaaagaattacacgtagtagatgaaataggagttgatttacagcgtgcatgtgaagaggcacatttaattgtttttgcttctccagttgaagaaacgaagaagctattacacaaacttgcgtcattccgtttacgagaagatgttatagtgactgatgttggtagtacaaaagggtctattatgaacgaagcggaagctttattttcaaaggatgtttctttcattggtggacatccgatggcgggttctcataaaacgggagttgaaagtgcaaaggcacatttatttgaaaatgcattttacattttaacaccgatgaatcacgtgccaaataaacaagtggaagaccttaaagtatggttaaaaggaacagggtcacattttcttgttttaaatacggaagaacatgattatgtaacagggatcgttagtcattttccgcaccttatcgcagcaggtttagtaaagcaagttgagaaacatgcaggagataatccgctcattcatcaactagctgctggaggtttcaaagacattacacgtatcgcatctagtagtccaaaaatgtggagtgatattgtaaagcaaaatcgagagcatttaatggtattattaaaagagtggatctctgaaatggaagatttatataaaacagtttctaccggagatgcaggcgagattcaaaactattttgcagatgcgaaagaataccgtgattctttaccagtaagaaagagaggggcaattcctgcctatcacgacttatacgtcgatgtattagataaggtgggggcattggctcatattacgagtattttagcgcgcgaggaaattagtattacgaacttgcaaatattagaagcgcgtgaaggactgcttggggtattacgtattagcttccaaagggaagaagatcgtatgaaagcaaagctagcgcttggagaagaagaataccaaacttatgaaacaatttaaatgagaaggtgaaaaacgtgaaagaaagaacaatacaacctgttaataacggattgaatggcaatattacaatcccaggtgataaatccatttcacaccgtgctgttatgttcggttctattgcagaagggaaaacaataattagaggtttcttgcccggtgcagactgtttaagtacgatttcatgttttaaagaaatgggagtagaaattacgcaaaacggtgatgaggttactgtagttggtaaaggattagaaggtttacaagaaccgaaagctgtattagatgttggtaattctggtacaacaatccgattaatgtcaggtatattagctaacacaccatttttctcttgcgtacaaggtgatgaatctatcgcaaaaagaccgatgaagcgtgtaacaaacccattaaaacaaatgggcgcaaacatagacggccgagaagaaggaacatttacaccgttaacaatacgtggcggcgatttaaaagcaattgaatatatttctcctgttgcaagtgcacaagtaaagtcggctattttacttgcaggtcttcgtgcagaaggtgtaacagctgttacagaaccacatatttcacgcgaccatacggaaagaatgctcgaagcatttggtgttaaagtaactcgcgaagggaaaacagtgaagctgtcaggtggacaaaaattaacagcaacagacattcaagtgccaggtgacgtatcatcagcagcgtttttcttagtagcaggtgcaatcatcccaaatagtaaactagtattacaaaatgtaggaatgaatccaacccgtacaggtattattgatgttttagaaaaaatgggtgctacgttcactgtagatctaattaacgaagaggcatcagaaccagctgcaaatattacaatcgaaacatcttcattaaaaggaattgaaattggcggagatattatccctagattaatcgatgagattcctgtaatcgcattagcggcaacgcaagcagaaggaattacagtaattaaagatgcacacgaattaaaagtaaaagaaacaaaccgtattgatacagtcgttgctgagttaacgaaactaggagctcgcatagaagcaactgatgacggtatgatcatttacggaaaatcagctctaaaaggcaatacagtaaatagttatggtgatcaccgtatcggaatgatgcttgcaattgctggctgtttggcagaaggaaaaacaattattgaagatgcagaagcagtaggtgtatcatatcctacattctttgacgaacttcaaaagttagctaaataaaaagggtggaaagcagatacgtgatgtatctgctttttttgttaaaacgtccttgtaatttcacttatcgaactataatagtaagaattatgatacaattcaaacagagaatggaggagaattatatgaatgtcatacaattaaaagaagataagtttagagaagcattacgtttatcagaatacgcttttcaatataaagtagatgaggaacgattacagcagcaacttacaaaaatgaaggaaagtcatgaaatatacggcattatggaaggggaagacttagctgcaaaactacacctcatcccgtttcatatttacataggtaaagaaaaatttaaaatgggtggcgttgcaggagtagcgacgtatccagagtacagaagaagtgggtatgtaaaagagctacttcaacattcacttcaaacaatgaaaaaagatggctttacagtctctatgttacatccatttgctgtttcgttttaccgtaaatacggctgggaactttgtgcgaatctactcaaatgtcatataagtaagagcgatttagtgatgaaaaaacaagtaaatggtactgtgaaacgttttaataaagaaaatcatccagaagaagtcgagaagctctatgaagcatttgcagaacgtttttcatgtatgttagttcgagagaagaactggtggttacaagcggtttatgatgatttaacattagcgatttactatgatgaaaataaaaaagcagcaggttacatgttatacaaaatagaaaactataaaatgacagtagaagaatttgtaccactgcataatgaagcacgaaatggtctgtggaactttatttgtcagcatgattctatgattaaagaaattgaaatgacagtaagtgaaagcgaaccgttattatattcattgcaagagccacgcgtgaagacagaaataaaaccatattttatgggaagaattgtagatgtagagcagttcttaaaacaatatgagttgaattggaacaatgtagagcaagaagtgatcctaaacattacagacgcatttgctccgtggaataacataacagtgagacttgcaaatcatgaaataacaataataaaagaaaaaacaatagataaaggcatcaaactggatataaacgagttatctacaataatgttcggctataaacgtccgttacaactgaatgaattagaattaattagcggaagtgaagaggaaatacaagcgtttgagaaaatagttccggtacgagaagcatttatttatgatttcttttaagttttcaatagaaaattgggctgcccaaaaacaatttttgggacagctttctctttggttgtcggtaagtcgatatatcctgaaaatcgctgatataattggagatgcgccgatatattctgaaaatcgctgatataattagacttgcgctgatatattctaataatcgttgatataattttttcactaaaacgtaactatactttgtcacgcacttgacttttaatccatgtaatttataattaaaaacggaatgaattttcattcctggaaatagaggtggaaaaaatggctaaaaacaaacaagaggatatttttgatgctgcgatgcaactttttgcagagcgtggttacgatggtacgacaattccaatgatcgctgaaaaggcaaaagtcggtgcgggtactatttatcgctattttgaaaataaagaggcacttgttaactcattattttcaaaaagtatgttacagctttctgaaataataaaaacggattttcctgttgaagcaaatattcgtgaacagtttagtcatacgtacaaccgtttatttgaatttgcgagaaacaatgtagatgcttttttatttacaaattctcactgtgatagttattttcttgatgaacagagtaagaaaatatttgatgattttataggcttctttatgaatattattgaagatggaatcgcaaaaggttttcttcgtccattgcctccagttgctttaattattattgtatatcaaccgctagaaaaattaacgaaagtaattgcaacagggcaattagaatactcgaaagagttagtaaaagaattagaagaaagctcttggaacgctattagaatcatttgattctatagctttataaggaaaggaatgaatattcattcctaaatagatttaaaaaatgagagtaggaaaggatgtttgtgtaactaagggaatgaacattcattccggaaagactagtttaatagaatttacaaaataatgtaatagaacaataggaatgaacgttcattccgttactaacgtgaaactttcaaaacgggagatgattcaaatgagcaagttaaaaagttggagaagtttatcttttctattatggatagttattactattacaatggtcgtaacgatgcctaatatggatcaattagtgaaagaaaaagggaaaattacaatccctaatacaaagcaaagcagtattgctgacaagatgatgaaagagatggataaagaaggggttgaaaagtatgaaattatagccgtttttaatagtggcaataaggcagctttaacagatgaacaaaaaaaggaaataacaaaaacaatcaacgccctgcaaactgaaaaagagcaattaggaattaaggaagttgtttcacatttagacaataaagacttggagaaacaattagtttctaaagataatacgactattttaacgcaaatatcgatagataaaaaacatggtgaaatatcaaaagtttcaaataatcttcatgaaaaagtgcaaacgaaaggggtaaaaacgtatttaacaggaagtgacttaatagcgggtgattttcttaaatcctctcaagagggagtgaaaaagacagaagttatttcaatcattttcattcttgtagtattaatcctcgtattccgttcaccagttgttccaattgtttctcttcttacagttggtatatcgtatttagtttcaatggggattattgcccagcttgtagatcaatttaattttccattctcaaactttacacaagtgttcgtagtcgtcgtcctgtttggggtaggaacacatgcccatcaacttaaggatagaaactctacggttttccattaattgaaatgaatcttaaaattggtaagacgatatggcgagatattagtaacggtaaacctggtgttttaaaagtgtggaacggtaaaggttgggaactccttattcctgatgtggaatcaattaaaaaagatacactggagcaggttaataaggatattaaactcgcaaaagaagaattaaataagaaagtggaagaagcgcaacaagaaaccactggccaatttaatacagtaacagaaagtcttcaaaaagttacgagaactatttctgacgtacaaagagatcaaggtgaaattgataaaaaagtaacccaggttgaacaggattctgagaaatttaaactgtctattgaaacattaacgaaaaatagtagtgagactacaaataaaatcaacaccttagaaagtgatgtggacggaaatacgaaagttatttcacaagttaaagaaagtgtagcaaacattaatgacgatgtaagaaacttattaatcggttctaaatcttttgatggtgctttgaactttgcgcaagcagacaatcgttggtggtttaaatcagccgataaagttaaaatttcgaaagatgtttttcaaggtaatgcagttgttgaaacccaatcatcatggactgctttagcttataacttcaaagatttggtgaatcggggagttgtcaaagtaggagataaagtaacctattcaatttatactcgagtaaaaggtttaccggatggccaagaattacaacacactttctattttgcaccaggtgctaccggaatccgtccaaataaatctactaatcaatggcaaagggtaagcgtttcgttcacagtgacagcaagtatgatgtcgttaccgggaacagataacgagagtcatttacgtatagaacctgatgcaaaccctcctgctggttgttggtatcagcagagttcaccacaattgactataggcagtaaagattattcgtggcgacctgctcctgaagatattgcagatggtaatgttttcaccaagataacaaccgagatcaaagaagaggctgggagaatctctaaaaaattggagcaggttgaatctcgtacagtgggcgttgaaaactggctaatcaatactgggcgaaatcaaaagccacaaacaattggaatgtctggaggcgcactagtcaacaaagctgctcaatcgttcactgaggattacatgatcgtagaatgtacagatcataccgactctttctatcaattccatctagataatactaagatgggtgactacgaaaaagagaaagatatgacatttagtatcgatatgcaaaatgatgctcttattgatttaattgtattccaatttattaatggagtttgggcagaaaacttgtacaatagatttcctgtcgctaattggtctaggagatcatttacatttaagattgatgcgcgggcaactggatggggattgcgattacgatttgaaagaaacgaaaattcaaagggtaagaaatttcgtttcaagaaacctaaactagaaaaaggttccgttcctacaggttttacaaaatcgacttatgagttggagcaaagttttgagggtgtaaaagaacgtattgaaaaaacggaatctatcattaatgatgctggtgatcgtaactatgcacgtaacggagatttcacacactattgggccgataacgatctgcaatgggataagaacctaaacggtaatttgcgcgctggtaattgggcaacaggttataacgctggaacaacagatcctacaaagggttatcatatgcacgttgatgacaaaaagtttgggtatcctgtagttgctgttattaacaaaaatggtcaattcggtcaagctaaaaggtggcttggaatgcctcaagaaatgccagctagttttcgaaatgatttccagccaggtgatacgtacacgatcgctttagatgtatggacggaaacagcaaataacaaaatagcggtaggattacaccactttattgagggtaacaatacaatgggctttcatagtggaggtacgccagaattgaccatcgaacctgttaaaaagtgggttcgagttcatacaacaatgaaattacatgataaatcagatatgaaaaaagggtttagtttatatatttatggtgatcgttctgctgatggtagtgagtgctacttcaaaaatgtatccgtgttaaaaggatctatgccaaaagcatacgctccgtctccggaagatggggtaaaagaaaatgtattcagccagaaagtaacggagattacgcggaacgccgaagggataacaagtgatgtaaaaaaaatacaggaaatacaaactcagcaaggggaaacactgactcaagctactacaacgatcctgcaacaatctgaagaattgaagctagcaatgaaaaagaaagatgttgaagcttatgtaggtggtttaggtactgtcaacgagttgcgtgatgctaattttacgttaggaccgaaatattggttttggaatagcggtaatggggctactggtgctgttgatacgaatttaaaatacaaaggtatgaatacatttgcaattactgttactggacagtcccaagatcgttggtggggacttacaagtcaatttattgagtgtcaggttaacgaagactttgttgcatcaggttatttcaatactgacgggaaaacacctattgatggtggcggtgcatttattgaaattgaatggtggactgctgacaaaaaaactcgcattaagacagctagaacgaatatcactgttgtaaatcatacatgggttcgtgctgtatgcacagataaagcgccagctaatgcggcgtttgtgagatggcgttattacgttacaagaaatggacgtttatggtgtgctgcacctatgttacaacgtggcactatagctacagaattttggctacatccaaaagatcaaacggatgctgacaaaatgctagaagatatagccaatagaatagctactgaagattacaataaaaaagttacagaattagaaagaagtattagtactaataaagagggcgtttcaatcatttctgaaaaacaagaaacgtttataaatgagacttacgccgcttatgtaaaagcaacgggttctaaacttaaggttcttgatgaaggaatccttgcagaagttaaaaaagggaatatcatcgcagctattaacttttcatcggaaaaattagagattgatgtttcaaaggtagctattaatgccgatacaatggtgaaatggttaacggcaaaaggcattgatacgaatcttattagaattgacggtgataagataactattgataaagatggtgtaactgttaaaatgctagatttcctattccaagacgaatggggaacaaaaacaactgcggtatcaagacgaaacctaatatcagatcccgacttttctagtgttacaaagaaaaacattggacataccgattattatgggtttgaaggtggatatggtcttacttggaagtcatggggaaatgtcgtaatagaaaagaatacacatatattcgattacgagcaaatggtaaatgctgcaagggtagatatgtataactatcccgaaacagtcgtgaataatgggatacatcctggtaacgaatatacagtttctgctcactttagaacagctatgataaatggtgcacgtaaaacagggaaacctcgtttacaagtatgctgcgttaaattccgagacaatgtaagttacgatatatggaatgaacaaaaaatggattttcctgaaccgtctacattttatggagaaatcagaagatactctttcactttcaaagtccccacaaactatattccgcaacaacacgcattgattgttaaagtttgttctggaaatgctgacatgagacaagggacagcgatttgtgtaagtggtgtaacgctatacagtggcaaatatgcatctatgtataattgggatcgtgctgcagcagaaagagcagatggtattcagccgtttaacgcgcttgctgtaggtggtgtgaataataatatatctccatcaccagacggacaaacgtttgatataagtactgaaaaagaagtgaaaatccataggaatatacgagcaatgcaggggattaacttaggtggcggtggattccaacaatggggacatattcgttttacagacggtaatgctggagcgggtttttatgtgagtactccaagtggctggaaatttaacgcacttggatagaaaggaaggattaaacatggatattaactatatgatgccttttcaagaaggtgaaacgcttccttatatgggaagaatagtagacgtaaaacgaacggaaacaggagtctttatacaagtacctgctgacatgttagataatgcaggggtttccaatgatacgagtaaagttgaggtgtggagggaaatgtctgacggaactattggttttagggttttaacgaaatgtgagttatgtggttgtggagccaaattatatgaattgaacttaggagttgctaaaaggaacatttgtgcaaatgattattttaaacttacaggtgaatatccgccacaagagacattaacaattgaaaatacaacgcaaatagggcagccataagctgtttttattttgcacaaaatacggcttttgttttgaaatttctgcgatgcattcaccataaataaggttgtctcatatcatgtagagattgttttattaagattttaaaaggatgtgaatgcagtggaagatgtatatgtaaaaatcgacagtttaaaagcagaacaaaaagaaattatgcgagatattcgtaatttagaaactcgcacaacaattaatgagaaagacattgctacaattaataagcaattagaaaagattagcattaatacaacttggattttacgaattattattagtgcaattactatgtcagtcttgggtttaatattaaaagggatgatttaatatcttaaaataaaagtacttattgagagagggacaagcgtctctcttttttattataaataaggagatggaaagatggatcgtattgatatattaatgaaagcatttatagctacatttggaggcttttgtgggtattttttgggaggatgggatgcaacattgaaaatcttagtaacgatggcagttattgattatttaactggcatgattgcagcagggtataacggagaattaaaaagtaaagttggtttcaaaggcatcgccaaaaaggtggtgctttttcttttggtcggagcgtccgctcaactagattcagcactgggaagtaacagtgcaattcgtgaagcgactattttcttcttcatgggcaatgagttgctttcacttttagaaaacgctggtcgtatgggaatccccttaccttcagcattaacaaatgcagttgaaattttgggcggtaaacaaaaacaggaagagaaaaaaggagatgttcagtaatggaaatcaaaaaaatgttagtaccagaaagtcgttattcagttttatgtccatatccaatgaatccaacggaaattacattccacaacacgtataatgatgctacggcattaaacgaacgtaataatgtcgctaacaatagtacaggtacttcgttccatatcgctgtagatgacaaagaagctattcaattaattccgtttaatagaaatgcttggcatgcaggtgatgggaatggaccaggtaatcgtaatagtatcggtatagagatttgttattctatgtcaggtggggaaagatatcgtaaagctgaattgaatgccgctcaagtaattcgtcagttaatggatatgttcaacattccaatttctaaagttaaaacacaccaagaaagaaacggtaaatattgtcctcatagaatgattaatgaagggcgtgtacagtggtttaaacaacaattagtttctggtggggaaattcaaattccagaaacgccacagattccacaaccaccaattacaagtggtacaggtattgtttatattactggtcaaaacgtgaacttacgtaaaggaccagggactcaatatgattcaattaggaaactaaatgcacctgaaaattataaagtgtggggacgttctggcggatggcttaatttaggtggcgatcagtgggtttacgaaaactcagagtggttacatttcgaagcggatggacaatcatccacaacttcgcaaccttcaaatgatggtttaggggtagttactattacagcagatgtattacgcgttcgtactggcccaggaactaattatggcgtcgtaaaaaacgtacaccaaagcgaaagatatcagtcttggggatatagggacggttggtataatgttggtggtgatcaatgggtttcaggtgaatatgtaaagtttgaaaagtaaaacacattactatacaaaagaatagttttattataaaagaggaacgtgttaattttatatgtaattaaaatttacttttaatatagggtttatgattggagcctatgtgtatgtgaaatagggaatagaaaaaaagcattcgtccccaagaatgcttttttcaatagatttatcataaaaggagaaaaaatcactgtcgatttcattatatgtaggtacaccgtgtaatatgcaaaacatactaacattagtagtacaaaccaaggccacggtttgtgctactattttttttagtagaagtgaagtaaggtcgaaaggtgtcttggaccatattggagtccgtataaataaacagatcgacttcacacccttatttgaatcagtttagtatgttggatccaggagatcgtgtataagaaagtggaatcgataaggcactgtggaggcttctatgattggcaaaaaaggagagattcatgtcatgcaacacgttgtagcttttgatgtcagtatgggtaaaagtatgatggttatttacaatcgataccgtcaatgtgaagtagagaaggaaattaaccataaccgtccctcttttgaacagcttcatgaaacgcttcaggaactgataggtcgaggtggagaagaacctgaaattgtttttgaagcaacaggtgtatattccaaaccgttggaacgattctttcaagataataattatgcatattgtcgtattaatcctcttgaagcaaacttacaaacggcttcaatgcgccgccaaaaaacagataaaagcgacgcgcatgaactggcaaaatcgcactttcgagtaggacgtgaacaaacgtatcaagaaaagggatactaccaacagatgcgtggactcacacgttactatgatgagttagacattgagattactcatttatattctcggttacacgcaatcctacaattgagttttccagagttggaacagctatttacaaagcggtcgtccctgtttttgaatatcgtacaactatatccacacccggatgaagtgttagcccattctaaaacgagaatttgcagtaggttaaaggcaaatacacaaaaacggttgtctttgaaacgagtagaagagaaaggaaccgccctccttaaagctgcaaaaatctcttacccagcaatctcaagaaacgatgtacgctgcgagcaagtcaaagattatgccagccgcattgcagacttgaaagagaagaaggcacagcttgtaaagcagatggtggaactttctaatgaacgtacagaatatcatgtgcttcggtcatttccaggaataggggaaataacagccgttcgaatcatcggtgagttaggtgatataagacgttttaaaaataataagcaattaaatgcctatgtggggattgatattaggcgttatcagtcagggaatactcattataaggacaaaatcaataaaaggggaaacaataaactaaggaaaatcttattctttatggttacatcgatgattacattacgtaagaaaacaaagaatcatctggtagaatactatgacaaattaaagaagcaacctttgagaaagcctcataaagttgcatccgttgcgtgtatgaataagtttttgaaagtggcatttcatcttattacacacgaaaaactatatgattacgaaatagcatcaaccggttcgtaatcaactaaatatactatagcacaattgacctcgcgaaaaaaatgatatctcgttaggtctatttggtgtacacaaatttattttttagaggaaagatacccatcactctaaaaaataaattacttcatcgaatcaaatctttcaatagcacttgactaaaggtaagaaagacaccttccccagtcgaagatgtctttttcatgttgtaagttctttagatgtcaattctagagtatgcagtttacatatattttataccataataagttataagccctacttgcttcattattacgaatctgtaaacctctcccgtgtatcttgctaaacacaactaagaatgtcataaaagttgttggcaatagcccgatctgtcacaacgtgttgggttgtataaaccaagttttttacacggataatcattttacatcttcttttttatctcgtcaagttgtttagaataacgagagttgttcaccttctatttgttgaacgtctatttgccattggtataggtcgcccattcttctttttaattcagtttctattccgtgttttgcatgctcaactgttggtgcgtaaatttcaataaacttttctttgtattgttgcccactgggagagaaaacactataaacgatttgatattttttcgtgctgtatcacctcgaaagttgtatagatagcagtatagcaactgtattgttagtatggtaaagagatgtggtttttaacaacctattggaaaaagaaaaaacacctcattatgaagtatcttttcctgtgtttcaatccaaaagaaagatgacaaaactacaattcttgtaagacaccaaaagggaactacagaagtgtgttctcaataagagtatataacagcgcatagagtagggcaagtattactaagatattcccccacaattcgtagttttcattgtattaaccacctttattttttatgaatatactcttttttagttattcgtgagagaaccctctgttattacatcctcataatggttttataaaaagcttctgcttgttcttctccgtgatctaataaagttaaatactcatcaaaaaaatcgaagattacagaaacttgatgatctcgtaatttcatatgattgacaacgtacatcgtaccttgagcagcaagttcatctgtataagtcttttttttgcacatccattctttccacatggttaatgcacgttcgatacattgcttatctgctgcgaaacgttcgtattgcgatttcgttaacatatgtagccactctcctcattcttctaacatttcctcataggtactcttgtaaaaatcaaatagtccctgattatttaattcttgaacaatatgatgtattaccttagttgacaccggttgtgaaaatccagcagcaatggctgaaaactctattctctcagaatagtaacaaatatatgccaggtcatattctttgagtttacacatctgttttcctttcataactatttttttcattttggttgcactattgtgttaattgcgtctaacaagttggtgcagtgcaaaaatgggcgttttttttattgctatgatatttaaaatttacttttagataatgcctttagtattggattaataattctaccgattaaacgaaatcctctaaatattaattggacaaccttcatataatcatcccccttaaattaagtaaatcataccaatttcatgcaacaactgtaaatgttcgtttctaatttattgacggaacagaacgattgttctataatttatacaaacgaatgttcttgaaaggagcaattcatatggcagcaactgaaaatacaactaaaggaaaagagaaagcattagaagaggctctgaagaaaattgaaaaagattttggcaaaggtgctgttatgaaactgggtgagcgacctgaacaaaaaatatctgttgtgtcaagtggctctgttggattagataatgctttaggtgttggtggatatccgaaagggcgcattactgaaatctttggtcccgaatcttcaggaaagacaacactagcattacatgcaattgcagaagttcaaaaacaaggtggaactgcggcatttattgatgcggaacatgcgcttgatcctgtatatgcagaaaagttaggtgtaaatattgatgagttgtttgtgtcacaaccgaatacgggagaagaggcgttagagatagcggaagcgttagtaagaagtagcgctgttgaaattattgtagtagactctgtagcagctctagtaccacaggcagaaattgatggtgatatgggagcatcacatgttggactgcaagcaaggctgatggggcaagccttgaggaagatatcaggagcagtatctaaaaatggagtaatagctatatttttgaatcaacttagagagaaagtgggcgtttcatttgggaatcccgagacgacacctggtggtagagcgttgaagttttattcaactgtccgtctcgaagtacgtcgttcggagcagttaaagcaaggcagtgacattgttggtaataaaacaaaagtgaaagtagtaaaaaataaagttgctccaccatttcgaaatttagaatttgatattatgtatggagaaggcatttccctagagggagagcttgttgatattggggtagggttagatattgttcagaaaagcggatcatggtattcgtataaagaggagcgtcttgggcaaggtagagataatgctaagcaattcctgaaagaaaatgaaaatatacgtaattctgttcgaaatgaaatttatgaatactattctccaaaagaagaatctattattgtggaagaggagcttataaaagaaaatgagcccatcactttaaaagaatctgaataaggatatataaagagaattgtaaaataaaatacaatttatggacattttaaaagttgggacacctagttattagaactgggtgtttttttatttggtcataaaatccccatcaaagtaaaacttatccattaagttatttacaatcccgttgaaataagcgaatttacccatcgataaactgtttgaacatacctgttagtccaacatggttattttctttacgtttagaaatattgtggatgtctctaaatctatcgatgtagtcatataccatagttttaaatgtattagtaaagtatccaataggatttttcataagagtcccgttatgctcagcttcatgagttttagagaataaagcaacagaagcattggcaataatgttgttaaatacatctttgtctgatagtaaattaaatttcttagcagcctttttaacgatattcacagcattgtggaaggattcattgataacttttgaatcaaatgcagttgctaatttcattcgcatagattgtggaactcgataatcgataaaatcattatcattgacattagattgagactcgttactcttacgtatatttatatctttaatcttttgttttaaagaaataggttttgttttaatggtaggacactttgtaggactttttgtatctaccttgttggacacttcctccacaattggctgaataataatagcattagaagtttggcgcatatcttttttacgcttcattgctatttgattaatcatgcctaactccacaagtttcttcattaaacgttgtacagttttataggatacttccatcatgtcagcaattgaatttttgcataggaaactaacgcctacatatttacaactgtgacgctttaaaatatccaataatgtaataagtctagcttgtacatcggcacgtttaacagacgttctaatgacgtctttgtatgttctaacgactttgtttagttcttccacatcaataaatacggataaattgtgataggattcttcttttgctattacgtctatacgtttcgttttcattataaatcttgtctcctttttggaaacaaaaaagcaacagaatgccaaatgtaagcaaactgttgctaggagcccttacgtactgtaaaatagtgcgtgagggtacagcaggtgtttgcctatcgtgagtaggcggacggtatatagagtgttgatcgcactgtatatacacgctgtgctcttttgtttatatgttgtgtggtactcatatggtacttgtttatttttatttgagtgttttagatggaaataagcgttttatacgttttaaaagtgtttatttatcagtgtgtgttcttatgtgatactttttgtaaattgagtgggaatagtatttataaaaaggtccatctattgcttatgcatagatggatcttttttattttggcattaatacgaacgaaactataaaagtttatgaaaatgttcgtttttaaattgacaaaactacttcgtcgagttaatatgattatgtaattcaaacgaaaagtgaatattatagccgtcgtataatatcggggatatggcccgaaagtttctacctagctaccgtaaatggcttgactacgaggcgtttgtataaagatgaggggaaacttgtctttgtttatagaacgcttccatgtatatatgcaatggaagccttttttatttctcgggataaaagagggctagggtgaaatacggcgagtaatcatataacgggggaaacataggatgaaacgctattttcagtttgatgagctcggtacgaattataagactgagttcatagcagggttaacgacatttctatctatggcttacgtactatttgtcaatcctgctacgctgtcgcttggaaatgttaaagggttaccagcaggtacagggatggatccaggtgcagtattcgttgctacggcattagcggcagcgatcggttcgttaattatgggtattttcgcgaagtatccaattgctttagcgccaggtatggggattaacgcgttctttgcttatacagcagtcttaacgatgggtattccgtggcaaacggccattgccggaacattaatgtcaggtattatctttattattcttactgcttcaggtattcgtgaaaaaatcattaatgcaattccatcggagttaaagtttgcagtagcagcaggtattggattattcattgctttccttggattccaaaatgccggaattatcgtgaaaaacgatgcggttcttgttgggttgggggacttaacaaagggcacaacgttactagcaatcttcggggttgttactacgatcatcttcatgattaagaaagttaatggtgcagtattctacggtatgattcttacagcgatcttaggagttgcaacaggattaattgatactccgaaagctgtggtgggagcaataccaagtctagaaccaacgttcggcgtggcgttaacgcacttcggagatattttcacagttcaaatggggattgttattataacgttcttctttatcgatttctttgatacagcaggtacgcttgtagcggttgcaaatcaagcagggttaatgaagaacaataaattaccacgtgcaggaaaagcgttatttgcagatgcgattgcaactgtaattggtgcgattttaggtacatcaacaacaacgtcttacattgaatcgtctgcaggggtagcagcaggaggacgttctggatttacagcagttgtaacagcaggattcttcttactggcactattcttctcgccattattaagtgttgtaacgccagctgtaacggcaccggctttaattattgtaggaatcttgatggtttcttccttaggggaaattgattggaagaaattcgagattgcagtaccagcattctttacaattatctctatgccacttacgtatagtatcgcaactgggattgccattggatttatcttctatccaattacaatggttgtgagtggtcgtcgtaaagaggttcatccaattatgtatgttatgggagttttattcgtactatatttcatctacgttcgtaaataaaaggggttttttaaaggtctagacttaaggggagtctagacctttttgcgtcttcagaaaatcttaaggatttccgagcgtttttcttcagaagttttcctataatagaagttagggattaaaaaagtgatgggggagatattgtggcacacgaaacaatacttgtcgtagatgatgaaaaagaaattcggaatttaattacaatctatttaaagaatgaaggatataaagtattacaagcgggagacggagaagaaggattacgtctattggaagaaaatgaaatacatctagtcgtattagatattatgatgccgaaagtggatggtattcatatgtgtatgaaggtaagggaagcgaaagaaatgcctattattatgctttctgccaaaacgcaagatatggataagattttaggattaacaacaggggcagatgattacgtaacgaagccctttaatccattagagttaattgcacgaattaaatctcagttacgccgttatatgaaaatgaatggtttcgctgtccaaaatgaggacgagttagaaattggggagatgaaaatcaacatctcgacccataaagttgttgtagagggagaagaagtgaaactaactccgagggaattttcaattttagaattgctagctagaaatccaggtatggtgtttagtgcggagcaaatttatgaaaaggtgtggaacgaacgatctttccagtctgataatactgtaatggtgcacattcggaaagtgcgtgaaaagattgaggagaatccaaggaaacctagatatataaaaacagtatggggagtggggtataagattgaaaaagatatttaatccgtttacttatataaggaaaataagagaattaattgagaaattagtaaagagcgtacgaaagagtataaggattcaattgattactacttttgctgcttgtgcgttattaggagttttgtcagcgaagggagctgcgccattttttgagaatgcgaatcgtcaagcaactatcgattatcgggctggtatggaacaaattaatcaccaagctcaaggagcggcaaatagttcggttcatgaaaataaattagaagctatatcaaatatgatcgaaatggagaaccaaaatttagagcaagggtctagagctttaaagatattggttactgatgaaagtggtaaagttttatataaaacaaagcaagcgcaagaagagcaaatcgatttgcataatacgattcgtaatgcagcatcatttgcgattaattatacagatggtagaaatgtatttgaaagtacaagaaaagagtttatatctttttcacctattactattgaaggaaagaatttgtacatgtttgttagcggaattccagagggagaggtaatgtatgacacgaaagaagggccattcccgtttttaattggtgttcttgtattcattttctctttcttctatataacaaagagaaagatgaagcagattgaagcaatggcacaaggtgtaaaggaaatagaaagaggcaacttagcgtaccgcattgagaaaaaaggtgaagatgagattgcagctttaactgagaatattaataatatggcagaagagcttatgaataatatagaaaaggaacgtaaattagagaagcaaaagaatgagcttattacgaatgtatctcacgatttacgcacaccgctgacttctattatgggctacttacgattacttcgagattctaaatatgaaaataaagaacaacacgatgagtatacgagaattgcttttgcaaagtcggagcagttaaaaaatttaatagaagatttatttgagtatacgaagttaacaaatgaacaagttgtattagaaaaacaggaagtttgtatgaatgagctactcgagcaattaatagaagagttagtaccgcaggcggaagaacatggacttacgtttgttaagaagtttcctgaggaacgtgcttatgcatcgattgattcggaaaagatggttcgtgtatttgataatttactaatgaatgcgattaagtatagtaaagatgatgcagatataaaagtttctcttcaaaggcagcgtagggatatacaaattgtaattgcgaatcatagtgaagagtttacgagagaagagttagcgaatttgtttgaacgtttctataagaaggatcaatctcgaagtagagtaacggaagggtcgggactcggtttagcgattgcgaaaagtattgttgagttacaaggtggtagtattcgagcggaatatagggatggtattattcaatttatcgtttcgttaccaattatagaaaaataataaatgaatagaatgatatgtgataaaaaggcttattttaaaagaaataagcctttttatattttttataaaaacatattgacgattagagcttagaggtgtaatatagaacaagtcgccgatgacaataacgtcgcaagcgacaaacgaaatgaaaaacttagttgacatcaaataacgaaagtgttaacataaggaagtcgcaaatgagcggctaagtagttctttgaaaactgaacgaaacaaacaacgtgaaacgtcaatttttattttagatgctagacaaactaacttcttgatgttgcctaacttttttcaaaatgtcctttacaaagggtacagattaataagagcgcctcttttttatttttcacgtttttctttaattgctactgtacatcttgatatacatagtaaatcatcattttcatcaataatgcgaacatcccaaaccattgtcgattgtcctctatgtattggtgttccaatcgctgttacaattccatctttctttgagcgaatgtggttcgcattaatttctaatccgaaacaaatacatttttcttgatcaattaaattatatgaaccaacacttgccactgtttctgctaatgcaaccgatgcaccaccatgtaaaaatccaaatggctgatgcgtacgctcatcaacaggcatcgtagcaaccaccttatcttctgtcatctctaacaactcaattccaagtgaatccattaaagtttttgccatatcgcttcccccttctcttactttaattaaatgtataattttacctatttattttcaaactacttataacacttatataaggaggcttcacctaaatgaaacagaaattttgtatattactgcttatgttctccttgctgactattgtaccaaattgtgcaataacagccaaagcatctaacctgacaatcgatgttaagactgtaacgcaaaaaggtaagaaaccttatatagaatatcaaataaacaggccttattttcacgaattttctgactctaaatttcaaaataaactcaatttatactacaaaaaatccactgacaaatttaaaaccaaattagaaaaagaagcaaaaaaatattataaagagacagaaggatctagtacaccatttcatccgtacgtagcaaatgttgattataaagtctctttaaacaaaccaccttttcttagcctatatgtgaattactatcaatatactggtggagcacacggtctttatacgtggaaggcaaatacattcgatttaaacgaaaaaaaggtactgcacttagacgatttatttcaacaaaaggataaatataaagatgtaatccgtgcggagattgtacgacaaattaaacaaaatgaaagcatttattttcctgatgcaactgaaaaagtaatgagtatgaaaaaattccacttctttttagagccagacaatctcgtcatttatttccctttatatgagattgctccctattcaagtggaattccgcaatttcgtattccatatacgttgctaagagactatttaaagccttcttatcaaaatattttgattgacaacaagtaaatattttcgctacgataatgttaacctaaaaacaacaggaggttaacattatgagaagatttcatgttttagatttagcattagctgccatgttcgttgctcttatggcaatcggtgcaaatattgtatcttgggcaccattccttcaagtagcaggcatcccattatctatgcaaccatttttcgcaattttagcaggtcttcttcttggaagtagacttggtgccttatccatgactgtatatatgctcgttggcgtagccggcgcaccaatcttcgctaacttcaaagctggatttggagcacttttagatcctactggtggttttattatcgcatttattatcgttgcttacgtatccggaaaactagtagaacaaaaagaaagaccaacattcattacatttgcaattgcctctttcacaggaattattttaacttatataatcggtactacttacatgtacggggcagtcaatctctttatgggcggtaatatgagctataaagctgcttggatgattatgatgtggtttgcagtaaaagatattgcatttacaattatcggtgctattatcgcacctcgcatatattatgctgtgcgtcgttctgcttatcagcattctcattcgacgatttcataataaaaaaatgagttatttcagtatactgaaataactcattttttattatgactcttgattcgcttgttcttctaaaattttcttcatcattgcaaccatgtcatcacgtaattctgggtgttgcagggccatttcaattgtcgtttgaacgaatcctagcttttcacctacgtcgtagcgctttccttcgaaatcgtaggcaaatacacgttggatttcatttaagctttggattgcatctgttaactgaatttcaccaccagcaccgacatgttgctgttctaagaacataaagatttcaggcgttaaaatgtagcgccccataatcgctaagtttgaaggagctgtaccttgtgctggtttttcaacgaaattgcgaacttggtaacgacgaccttcttgttctaatggatcgataattccatagcgatgtgtttccgactccggaacagtttgtacaccaataacagaagaaagtgttttttcatactcatccattaattgacgtaaacacggtttctcagcttggacaatatcatcacctagtaacactgcaaatggctcatcaccaatgaatttacgtgcacaccaaacagcatgtcctagtcccttcggctctttttgacggatgtaatgaatatctaccatttttgaagaagcttgtactttttcaagcaactcatattttttcttctctaataagttttgttctagttcaaatgcgttatcaaaatgatcttcgatagagcgctttgttttaccagtaacaataataatatcttcgattcccgatttcactgcttcttctacaatgtattgaatcgttggtttatctactatcggtaacatttctttcggcattgctttcgttgctggtaaaaaacgtgttcctaatccagctgctgggattatcgcttttcttacttttttcatcacaaaataccctctctcctgtcggaatcaatagcaagcatttcctacataaaacaaaagggagatttcgctcccttttgttccttactacttaaaattactttgtattataaacgattcataatgtcttctttaatagtaagtaacttttgttcactattttgtaaagaactatcttttacaccaaagtaaaacttaatcttcggctcagttccagatgggcgtaggcagaaccatgaaccatcctctaattgatattttaacacatttgatttcggtaagtgaatctcttctttatgtccatcttgtaaagatgtaacgatgcttgctttatagtcttccactgctacgactgttaagcccgctacttctttcggcggattctcacggaacgttgccatcatctcttggattttttccgctccatcttttccttttaacgttaacgatacaaggtcttcacggaagaagccgtatttctcaaatacttctaatagaccgtcatataacgttttcccttgtgatttgtagtatgcagctacttcacatgcaaatagaacagattgtactgcatctttatcacggcagaatgggcggattaaataaccatagctttcctcataaccgaattggaattcatattgtccgctttcttcatactgtctaattttctcaccgataaatttaaatccagttaacgtatcaactgtatctaaaccgtatgcttttgcaattgtacgaccaatttcagacgttacgattgtttttaatacgacaccgttctctggaagcgttccgttttctttcttttgagatagtaagtaatcaagcattaatgcacctgtttggtttccggttaatacttggaactcaccattatgattacgcactgctacaccaagacggtctgcgtcaggatcagttgcgattaatacatctgcgcctaccttttcaccgtcacgaattgcatactcaaacgctgcgtgctcctctgggttcggtgattttactgtagagaagtttggatctggtaactcttgttcttttacaactgttacatctgtaaatccaacttcttttaaaccacggcgtacagaaatatttgatgttccgtgtaatggtgtaaagacgatttttaagtctttaccaaccttttgtaccatttctttattaatgatgacattgttcaattctgcagcatatgcatcatctacttcttgtccaataatatgtaataaaccgtcagcttttaattgctctacatcagcgacttcaactgttaattcatcttctactgcatttacgtagctaattaactcatctgcttcttttggaggtaactgtccaccatcttcaccgtatactttgtatccgttatattcaggtggattatggcttgccgtaagaacgattccacttactgtatgtaaatgacgaactgcgaaagaaagtactggcgttggacgtaagctttcaaacacatatgttgtgataccgcgtgcaccaagtgtagcagcaacttccattgcaaactcaggtgatttatgacgagaatcataggctacaacaacaccgcgttttttcgcttcctcacctaacttttcgataaagcttgctaatccttttgttgctttacgaactgtatatacatttaaacggttcgtaccagcaccaagttcaccacgcataccacctgtgccaaactctagatttttataaaagctatcctcgattttcttctcatcttgcttcatattttctagctgttcttttaattctgcatctaattgtgcgtaagaaagccagcgactaaattcttgtttccaattcattcttctctctcctctcgctcgtcatacctttattatatgaaaaaaacatgctgtatctcaatattttataaaatctaacaggattttactaggaatatttgtatacactattgttaaatactccactaaagggaatgaggattatgcacgaatggggcttgtcagaagagctcaaaatacaaacaaagcaaatgattgaaattgctgaaaaagaactatcgattatgaggaacgcaatcgataaagaagacgaatgtattttatgcaaaatggaagatattcatcatatgttagcaaatgtacaaacattggcagctacatactatattcaggcatatttatcaccttatacggaaagttcatcttttattacgacagctatccaacatttaagcgccagaaaacatggtgctcttatcgtcgtggaacgaaacgagacgcttgaagctctcattcaaactggaacgacattaaacgctcatttaactgcgccattactcgaatcaatattttatccaggtaaccctcttcatgacggtgccgttctcgtaaaaaataatcatattgtctcagctgctaatattcttcctttaacgaaaagtacagaagttgatcctgagctaggaacacgtcacagagctgcaattggcttatctgaaaagagtgatgcacttatattagttgtctctgaagaaacgggccgtacttcttttgctttaaatggggttttgtatacgatttctttataaagtgaaactttaatcagccctcaccaatcgagcgtttaccggcaatccgacctaactgctttcctttcgctgaattttgagttatgggtcttactacccggcaaatagtgggataaacaaacctataaaaaagaagactgttccaaaatatcggaacagtcttcacttatactcttattcttctccaaaacgctccacaagtgttgcaagtgtacgtaccattgcgccagttgctccagctggacctaagtcgtgcgcaccttttgtttctgatgttccagcgatatctaagtgtacccatggtgtatcttcagcgaattcgcctaagaatgtacctgccataaccgcatgtccttcacggcctggtgagttatttaaatcagcaaacttactgtttctcacacgttctttatcacgatcaaaaatcggtagttgccaaattggctcatctgtttccatagaagcctctagcacttgctcaaataactcttcattatttgtcattgcgcctgtcgtatagtttccaagtgcaacaattacaccgcctgttaatgttgcaacatcaacaaggtagtttgcaccaagttttttcgcatacgtaataccgtcagctaaagctagacgaccttctgcatccgtatttaatacttcaattgtttttccgctcatagatgtgattacatcgtctggcttaaatgccgtaccacttacaacgttatcagttgaaggaataacagcgatcacattttgttctgggcgaagttcaccgataatttccatcgcacctaatacagcagctgcaccgcccatatcacctttcataccaaccatgccttcacgtggttttaaagaataaccaccagtatcgtatgtaataccttttccaacgaacccaatgacatctgtccactcttcttttcctttataaataagagcaatcatttttggtggctctacactaccttggtttactgcaagtaacgcacccataccaaggtcttccatctcttctttctcaagaactttatagtccatatcatatttctccgctaattcaacagcatactcagcaagctttgtcgctgttaatacgtttggcggcatatttacaagtgtacgagctgaatttgttgcacgtccatgtacgtagccaactgttaatgctgcttcaatttcttgtgcatcttccgctgtaatagccgtgaacttctctaactctacacgatcctttttatctgatttatacgtttgtaactcatatgtaccaaggccttgtacctctgccgcaatatgagcgacatcaatcgcgtctaatttctctgttacgaaagaatcaagtaagattgctgcatctcgtacttttgctgcttgcagtgttttaaacgccttaccaagagccgcacgtaacgtttctgtcgtgtaagattctttctttcctaaaccaacaaagtaataacgtttcacatttattttccctaagctatgtactttcgaaatggcctttttcttcgtagataattctttctcttctagtaaaacttgtaattgcccttcaaacgctttgtccagttcttgtacaaaactactcattttctcttcttcaaataaagcaacaattaccgcttcatgacctgctaattctttttgtacttgaaacatgttcagaccccctaaatttctctaccaccattataactttattttcgataaaatgcgataattctaactacagttatatggcgtgtaaaatcgcagatccaaaatctcctctatcatgaaataagccaagaaaaaaagtctagcgtaattacgactagactatctttgttttaaatattgaccacgaaacacttgcatcgtttcgtcttgatttaacatcgttaactcttcttctgtaaatttaccatttcctacttttactacgtacacatttacttttttcttaccccattggctataaacatctttcaccgtatcataatatagatcaagacggtttccttttattgcaccgcccttatcagctactacaccatacccgtaacctggcacgaagagaatcgttccaatcgggaatacgcgtaagtccgcagcaattgtggaatataaatcccttttcactttgacacctgaatatgtaataccatactctggatgccctggcctcttaccagttgactcaatccccgatgtataacctgttgcagtcatttcaattgaacgatatttagaccagtcgtttgcctgctctaaagcatttatcacttctttactcggagcaacatttctcttaacttctgctgcatgtacttcttttgcactcattccttcatatatctttacaatctctaataaagaaactcctgtgaaagcattccatgttacgcataatgcaattgcaagtaaacaagtcatcataatgcgaatacaatatcgttttaacatttttatattccacactccttcatcgttaatcattccctatacgatgaaggaatatgcaaaaaaataatctccaacttaattggagattaaaacatttgatatccgcttttccgaagtttcttgattacgactcctgctaaagcagcccctactaatccagtagatagaataaatacgtctgcttgtcctaagtgcgatacacttgtcccaaatgaagaaaatgtttctttcggttttgaaaaataatcccacatactcgctttattaataataagcatacaaacaatcggatacacaataaccattacccaagtagctcgcaaaatcatgttgagtaaaaatccaattccaaagaacaaaataaagaataacatcattgaaataagtagtaccggtatactcactcttttcccctctccttcgcacgtgccgtaaatacgtgataagctgtataaccaaatggttcacctggatttaatgttttgtccacttcaagatgtagttctgatcttccttctaacaaatatttaataagcacagacgtattcggatcgtctacaatcttatccggatgtaagaacgccacttcagacaattctttctcctgtacaataatattttctccttcaggttccaaaaggaaaataatcatattatcactaatctcattacgaataacacccgatcgaacaccaataatccccttcacatgagcgacaatgcctgtctcttctaacacttcgcgtttcacagcttcatcaaccgtctcaccttcatttacaaaaccagccggtaaagaccatttcccttttaatccactgtatttcttcttaacaaatagccacctaccatcttttgtagctactaaaccactaacagctagccataccttccctcgtttctccatgatgtaataacctcctccatcagaacggacagaatattctttcttttttatatattatactatatttttaatatgaaaaaagcagaaacagctcttagccgtttctgctttttctactatatattaaaagaactttaatttaccttttttaagaactaataaaggtccacctaataagaataggtaacggttatcgattactttcttcatgaaggaagctttccaacctgttaactttttacccataacaacgcccattgcatcgtcatgacctaaagaacatacagatcctttattatcgaatgcgaatttcttcatctcgcccttgccacgaactaatacagttaagttgtgtgcaatattgtaaccttgttgaattgcaatttgtgctgttggtgggtaaggacggttaatttcttcattaataattaacgctgcgtcaccaaccatgaatacatcttcgtatcctggagcgtgcatgtactcatcaacttttacacgtccgcgcattgcttcaaagccagactcttccacaataccattaccacgaacacctgcagcccaaactactgtttcagacttaattaattcagtgtcatcgccattcgcaacgataataccttcttcagttgcttctttaattgctgtaccgatgcggaattctacaccttttttctcaagctgttttacagcgtattctactaacgctggatcaaaacctggaagtgctgttggagcagcttctacacagatgatacgtgctttttcacgtggtacattatactctttgcaaagttcaggaacacggtttgcaagctcacctacgtactcgataccagtaaatccagcaccaccaacaacgattgttactaactcatcgcgttgttcagttgcatatttagagaaactagcttccatatgctcacgaatttcacgagttgcattaatgttagcgattgagaatgcatgctcttttaatcctgtaattccgaatgtttctgattcgaaaccaagaccaattactaagtaatcatactctaactcgccatcttttaagataatgcgtttttcagcagctttaatttctactactgtgtcttgtacaaagttcactttatttgtatcaataacgtcttgaatatctagacagattttttcatcttgtaatgtaccagctgcgctctcatgtaaccaagtcgcttggtagtgatagctgttgttgtttactagcgtaatttcagcttcatttacagataatgctttttgcagacgaacagtcgtaatcatcccgccataacctgcacctaaaactacgatttttggagtcttcaccaaatcacaacccttttctttatataatagtaataaaaaataataccaagtactaaaaactctatttgtcaagaatgtggaatttatcacattctatatcataacaaaacgcagtcaaaaaatcgtacgaattttgtcatagaaatttaacataatacttccctatattagtcggttttattccagaattcaagcgtctggagaattatcaatattttaaaataacatagcgttttcaagggttttttagcctttttttcatgtattttcctttctgtatattttatacaataaaaaagaacctatgcgaaaacttacacacaattcagtcgttttcagaagtattatgaactcaaatatgctatcatttatttgaaagtgtcatcatttgcaggattttcgtgtacatatgaacaatatatgaaatcaatatcaaaattccatctatagggggaatgaaagtggcagaaaatcaaaaagtttacgacataacaattattggtggtggtccaacgggactgttcacagcattttatggcggtatgagacaagcaagtgtaaaaatcattgaaagcttacctcaacttggcggacaattatccgcactctaccctgaaaaatacatttatgatgtggctggatttccaaaagtgcgcgcacaagaattagttgataacttaaaagagcaaatgaagaaatttgacccaactgtttgtttagaagaagctgtcgatacgcttgagaaacaagctgacggtatatttaaacttgttacgaataagcaaactcactattctaaatcagttattattactgctggcaatggtgctttccaaccacgccgcttagaattagaaggtacagcgaaatacgaaaagaaaaacttacattatttcgttgatgatatgaataaatttgctggtaagcgcgtcgtagtatttggcggtggcgactcagcagtagactggacaatgatgttagaaccgattgctgaaaaagttacaatcgttcatcgtcgtgataaattccgtgcgcatgaacatagcgtagaaagcttaatgaattctcgtgcagaagtaagtacaccatacgttccagtagaactcattggtgatgacaagattgaacaagtcgttcttcaacatgtaaaaacggaggaaaaaattatcatcgatgttgatgacgtaatcgtaaactacggcttcgtttcttctcttggcccaattaaaaactggggcttagatatacaaaaaaacagcatccttgtaaattcaaaaatggaaacaaatattcctggcatttacgctgctggtgacatttgtacatatgaaggaaaagtaaaacttatcgcttgtggatttggcgaagcaccgacagcagtaaacaatgcaaaagcttacttcgatccaaatgcaaaacttcaaccgatgcatagctcaagtatgttttaatatgcaaaaataaagctccttccatacgtggaaggagctttccttttatataacataaaagcacactgagtccaataaactatcgaactcagtgtgcttttcgtctaaaaaattattgttttcttcttctacctaatacgaataatactccgccaactaagaatgaaattcccgcaccaactgacatcatccatgaatgtgctccccctgttttcggtaattctttttctacttttacttgcggttctttaattaacttttccagtcttacttccggtttctccggtttcacttctggtttcttcagatctttcggttcctccggtttcacttctggttccttcggctctttcggatcttctggcttcacttctggttcttttggttctttcggttcctccggtttcacttctggttccttcggctctttcggatcctccggtttcacttctggttccttcggttctttcggcccttctggcttcacttctggttctttcggttctttcggttctttcggttctttcggttctttcggctcttccggcttcacttctggttccttcggttctttcggctcttccggcttcacttctggttccttcggctcttctggtatcttaagatcttcttttgttttcggtaaaattgtaactgtaggctcaagtggtggatttattttatcgtccactaccgctctatttgttatccctttacttggtgctgcttttaccttcactttaaaaataatactacgttctttcgtatctgtaatttctagatactttgctattacttttccaaactccatttttaactctattggatttggttcagccccttcaaatctaatgctatcttgcacgtactctaaaccggctggaatttcatcttctacctttacctctgctagtttgccgttttctaccgtatttttgaaactaattcggtattctacttcttctcctagcttcggttctttattatttactgtcttcgtcgcttttaacttaccatctttatattctggctttattgtcgctgtcggttccataactggatgatctggatcatctacatgaatgatcgctttatttgttatttcctctccaacttttaccgattcttttacctttactttaaagatgatacttctttctttcgtatccgtaatttctggatacttcactgttacttttccattctcgactttaagttctgttggcacaggcttatcacctacggcctccagactttctttcacatactctaaaccagacggaatttcatcttcaatctttacatcaactaacttcccgccatctactgtgccgttaaaagtaattcgatattcgatttcttcccctagctttggttcatggttacttacttctttccttgcctctagtttcccatctttatattgaggtgtaattggtataagtgactcaactggtggatttgtcggattattatcatccacaaccgccttgtttataatttcttttcctacttgtaccgtttcttgtactttcactttaaagatgatacttctttttttcgtatccgtaatttctggatactttgctgttacttttccattctcaactttaagttctactggatttggttccggcccatcagactttatactatcctgtacgtattctaaaccagctggaatttcgtcctctacttttacctcagttagtttgccgttttctactgtattttcaaaactaattcgatattctacttcttctcctaacttcggttcatggttactcactgtcttttcagcttgtaatacaccctctttatgttgaggttgtatcgcgacattcggtttctctggtggatttatagtatcttccacaaccgccgtattcacaatcgcttcgccaattttagctttttctttcacttttgctttaaagacgatacttctttctttcgtatccgtaatttctggatattctgcgagtactatgccgtttttcacttttacatgcaacggttttggattatccccctcagctcttccgctaccttctacaaactctaaactgtttggtaattcatccttaattttcaccttcgctaattttccgtgctcaactacgttacggaacgtaattcgatactctacttcttctcctaattttggagctgggttatttactgttttctcagcttttatttttccattcttatactccggtgtaataatcgcttctggtttttgcggaggattcttcggattatcatcatccacaattgccgtattcacgattttcttcccgacttttactgcttctgttacttttaccttaaagataatgctacgctcagctgtatcagtaatattttcatacttcgctgtaatttttccagcttcttcttttaactctaccggatttgattcattaccttctgcttttaaactatccttcacatactctaatccatttggtagttgatcctcaattttcacttctgctagttttccgttttctaccgtatttttaaaactaattcggtactctacttcttctcctagctttggatcttttttacttacctttttattagctttaaatttaccagctttatgctgcggtgtaatatctacttctggtcgctctggtggattttttgtatcatcaacaattgctttatttacaattgccttgtccacttcaacggaatctttcaccttcactttaaagataatgcttctttctttcatgtcagtgatattttcatacttcgcactaaccttaccagcttcttctttcaactctactggggccggcttatcaccttctgcttttagactatctttcacatactctaaaccaaacggaatttcatcctcaattttaacctctgccagttttccatctttcaccgtattattaaatgaaattcgatattcgatttcttcacctagcttcggtttatgattattcacctttttatgagcagcaattttaccatctttatattgtggtgtaatttttgctgtcggatcaattactggatggttcggatcatcaacatggataatcgctttatttgtaatgtccttccctattgtaaccgaatcttttaccttcactttaaagacaatacttctttcttgcgtatccataatctctgaatactttgccattaccttaccattttctactttcaactccactggttttggctcttcaccttcagctttttcgcttccttctacaaactctaatccagctggaattttatcttctatttttacctctgctagttttccatctttcaccgtattattaaaaataattcgatattcgatttcctcacctaacttcggttcatggttacttacttcttttcttgcctcaattttcccatctttatattgtggtgtaatcggtacataaggctcttctggcagattctttgtatcatctacaattgcctcatttacgatttcttctcccacttttacgctttcttttaccttcgctttaaagacaatgcttctttcctctgtatctgtaatttctggatactttgccattaccttattatttttcacatgtagctctactggtttcggtttagaaccttctgccgtgatactgccctccacatactctaaaccatttggtaatgcatcctttatatttacctctgctagttttccgttttctaccgtgtttttaaaactaattcggtattctacttcttctcctagtttcggtttatgattattcgccactttctgcgcagcaattttaccatctttatattgcggagtaatttccacatgaggctcttcgggctcattttttgtatctactacgattgctttattaacaatctccttgcctacttctgcctcttcttttactctcactttaaagataatacttctttcttttgtatccgtaatttctagatactttgccattaccttgccgttttcaaatttcaattctaccggacttggtttagaaccttctgcttgtaaactgttctccacgtactctaatccagctggaatttcatcttctactgtaacctctactagttttccgttttctaccgtgtttttaaaactaattcggtattctacttcttctcctacatgactgctttctgtatcaatcacaactttgtcaccaacatcgactatataaggcggtgtattttgattatttaagttcactttccaaaatttcaaatcggaaactgtcatcgcttctactggcggaacatcttgccactgcatgatacttatctgtatttgagctgctttttccatatgtttattgtctttatcggtccatcttgcaaagcgttctgaatcatctttttctgttccaggaagaaattttgaaatataagcctcccaatcattaccggttctagcgatccacaacctaccataatactgattccatgtattcggataatcaccactctcataaattaaacctgtttttccaggcttattatcatatccaattaccatcgttccaaaattttgttcagcttgccaatagaggtcattcatggcaatttttgaaagaactttgctgttttcatcgagtatcgctatctcaactcgtcccatttcattgatctttttacttttacatgtaacgtgggcttgcataataaaatcttgtactggcccaccagggatactctttttaacagatgcgccatgccatccattacttgaaccatagtccgaacaatagaattggtaactatctgttttcatttcaccaactggattaccatcttccatagaactaaccttactccaccctacagttgtggacatttcatcccatataagacgttgatttctttctacaggcaattgctccatttttagtggcattccaatacgaaaataatctggttccttttcgtatttatcttcaaaccatacatctaaaaaagtatgtggctttttaatatcaatttcaataatcggattggaatgcacagagcctttgttttggacattggcaattaacccctggccgtcattttcaaaatcaaccgttttctcatttcctaacttataaggcattgggcaaacaaagttcaaaatacctttacctaacgtaacaaaatcctctggatcaaaatcttcatcaataaccgctaagtatgtcctatcaggtgttacatcaaagactaattcaacaggtttttctgtaattaaccactctgctatttcttcttttactgtttctaagtctgatccatcaggaacgataattccgactggaacaggtaaaactcgcattttagtttctgtcgttaataatcttgcacctggataacctggaacgcttaaaaagttccgttttaacggagcccacgctggttttttccaccctttttcgatttgaatacaatccttgcgtatattgttaaatgtaaaagagctcacgttgccacctcatttcttttcaaattaaaagagactcaaacttaaaagtctgaatccctctgtgtttctcgttcttgatattcggttgtatagcgatatgtaccacgcgctacatctcgtccctctaaaacaacaggaacctccacaacgaaatctccaccaagcattggaatgactccaccaccagatgatcccgaagaataatgaatcacttgattcgcaacactagctgccatcgcttgtctactatttgacatatttccatacacaccactcataacactctttaaacctgataattgattcatggaattagccatcatccgactcatgtcacccattagttgattcatagttccagtgatacccagtgatctttcttttgaagataacggtgtaaccgtgatggaattccctcttttggtaaacagttcagggcctttttctccagtaataaatgagccatctcctacaggttttccacctttcgcaagcattggtacatgtggaatagtcggcgcgctaactcctggtatattgtttagtaattctgctggtgtattaaagccatctataaatttatttatgatacgaataattccattgatagctgtacgaataccacttttaataccatcccatacacctaatactgctgatttcatgccttcaaatgctccactaacggcatctgttacccaacgaacaggcgtcataatggcttcttttaatccattccagacagaagatgcggttgacttgataccttcccaaatgtttgaaagtgtagatttaataccattccaaatactactgcttgtgctactaatcatgttccaaaccgttgagatggcttctttgatgctattgaatacagaacttgctgtagaaacaattgcgttccataagctagatagatagcttttaatcgtattccatactgcacttgttgtggagctaatcgtattccatgtattcacaatccaatcttttattgaggtgaatatcggtgttacaaaagctactaacccgttccagcacgattgtaagaaattcttaacagcattccatacagacattgttgctgaactgattgcatcccaaacggttgtaactgtatttttaatccactcaaatacagttgtcgcaattgaaacgattccattccaacaagtcgttaagaaacttgtaagtgcatcccacactgctgtagctttttctttaatagattcccataccgaagctaaaaactctcgtatagactcaaaaattggagtggcgaaatataaaatagccgtccaaattgcttgtaagtattgtgtaataaaactccatacagtttgaatcactgtggaaatgccgttccaaatcatagagaagaaatcagcaattccttgtaaaataggagttagaaaggcaactagtccattccaagtattaatgaaaaactcactaatcgctgtccacacttcagaagtagtttgactgatgccattccaaacttctgataatgtttcaactactccatcccaaattccagtcaaatattccacaatagaattccatatttctgtagtcgtttcaacaatagaattccatatttcagataaagactcaactatcccattccatacctctattaagtattctttaattgaattccaaacttccgatgttgattcactaatgctattccacgtttcgctggcccattgtacaatcccatcccatatgcttactaaaaattctccaattgcattccaagcatcaatggtccattgtttgatatcatcccaatttttataaattgcaacacctagagcgacaacaagtgctactattatcggaataatagcaaccaaccctgtcatcgcccatcctatacttgttataacagcaactattggtgctaaagccatgaatgctcctgcaattacaccaatagcaacagcaatcgctgttaacgttgctgctaattcaggattattagaaatccattcagcgaatttagaaacaagatctgctataacttcaagaacaggctgaagagcaacctgtaaatcttgcattgcttgttgaaatttaaccgctggagatgcatctattttagaagtagcaccctgtaagtcttctactccttttttcaaatcgacttgtttaccttccgctttcaaaatggtgtcgatgattttcttcccttggtcttcccaaagagtaccgaacatcttcgtgccaagtgcatttctgtctgttgcattttcaacaccagctaaagccttcgttgcttcaagcatagccttttgtccattttcaccaccgccagcaattgcctgaccccatttttcaaactgatccgccgagatttttgttttatctaaaacctcttgcatagatttatctacacctgcaccaaattcggccattttaatacgaccttcttttacacccgatatgttcaacaggattcgcaacatcctgccagttctcttatgaacttctgtacatcactatacagaccagactatatcatcatcttttatataagatgctccccatttcgaatgtcatcagcttacaccctacgcttttcagctagtcgttgcacgttcctttgttaaaggcttcgctcagtattgtctcttttgagagttccactgaattaaaggagttttctatgaatgtcgccactcatagggacaatcatttatccaataggttatcgatattccaacttttagtatctactcctgctgacatgattccttggacttctttagccgaaaatccagcttgaatcatttgatctccatattcagcaataatatctaattgttctggtggaaatcctgtttttaataatgtattcactagccccaatgcttcctcgttcgtaatacctaacgttgcaccaatctcattggtttcttgtataagttcattaaaatcaattccagcgtaggatgctgcaatagtcgctgcccctttaaccacagcggcatttgtttcatcagaagcatctttatttaatgcccattgtctgcgaacaccttctaatgcttcttcagcgtcaataccataagtactaacgcccctaatcgcttcttccactgattttttcgaagactctggaacatcgaaagtgatatcaatcttagttttcaattttgacatatccattgctttttcaactgctgttgcgattccgccaccagctgccattccaccaatgacgttttcgagtcctactttgagtccttcaaacttcttctctgttctttcggcttcttgttgcaaatcccttaactcatttcgaacttgttgaattgaatttccagcatccacagatcgaagagcacgttgtaatttttcaatatcggcttctgttcctaatgcttctcgtccaataatcccaatcgcttgttctaactgtcgacttgtagccgatccacttttaattgcatttacaagacgattacctaatgcccctgcaaaatcatccacgcttttgcctgtagcgctaaacaacgtttctaattgtcttgttgaacttgccacattttcttgttcagctttcatattaccaagcttatttttcaaaccatcaagtgacccttgtgtaaattcaatttcacgtctaaacgcacgatattgttcttccgatatctttccgttttggaattgcgcttgaacctgctgctccgcttcttttaatttatcgagcttttgtgtagtgttttcaatttgttgtgtaagcaactgttgtttttgggctaatgcttccacattaccaggattaaattttaaaaggcgctctacctctttcagttcggttgctaagctatcactctgtttatttacatcttttaaagcgttttgtaacggctgcgtattcccaccaatttcaatcgtaatccctttgatttttcctccagccattctttcacccctttcttagaatgaatcaaagtctttttggtttgcttttctgactttttctttgtctggattctccatttcagcgaattcagcaatgtaatcaaagcaatcaccaatcgtcatgacgtccagatcccaatgcgttaatttcgctttataacaaagagcaaggaacgtatcagtggttaattcttcatcactgaacgtcccttgctctccattacttttgtttattttttttttgctcccattgtactttgaatcatatccataatttccgggataatatccgaaatagggaattcatcaaaaccgtctaaccatgtaattggttcggcaatttctggatttgctgttttcgcatataaccaaactaaatcatatacaacttcaaaatctagcttacttaaatctgcatttgctaaatcaatagtggctagtgaaccctcttgaggatttgaaggagacaaaatccctaacttaaacatatcagcaaataaatcacgtctgaattgcgctttatatcgtttaacagtagctgctgtactttttaatcggacttgttttccgtctattgtaattgtcttttccatttactattacgctccttttggtgctgctggtgtttttacatatacttttttgtaccagtcgttataaattgcttgtgttgttttagcagtcgttttcgttttaaccattggtcttccaccaggtactaaaacaattgggctagaaacaaacttcagttcatttgtatttggttcagccgaacttgtttttgttttagatgcaagtgttggacgacttgctgaacagttatacataacatgtcgtgttgcattgacatcaccatcaaactcaaataataaagcgaatggttttccttttgcatcagccaattcatttaatacaccatccgtttcgtctaattcttcaccgagtgcatcaatagcaaatttttctgggatagtagcaatacttaatgttccatcgtaaccctgattattacttgccgcgtaataaagcatgtcatctgcatagaattcaattaaatcaccgcgtggctcaaatgttagttcaactccaccaggtaatggaattggtgtcccaaatgtaactaagaaatctttactatcaaatggcacgtaatgtacatttttcaaaccgaatgttaccttgttttcattcatttacaacaacctcgtttcatatgttttttgaaataatttctcagattcaataaaaatcccatacgagtcataaggtatttcatgatcgtctaggaccttttccaacttggcttctgcaaccaagtccttttttgtggtataaagttcgatatttacatcatttatcttgtgatagaccttattatcagccattaaatttgctgaaccatccacaagaaaacagatataaggcggctccggaactggattaccaggtgttgctgtgaaatgcgaataagccacaggataacctgtagcttcaagaatttttctaaattctcctaatgttactgtcatgattcaattgccctttcaatacgttttggcaattcatcaattacatactcttcaactggacgaatatgtactttctctggtactcgtccaccagcagctttcgcatgaccattttctaaaagatgcgtcaattgcccttttgtattatggataacaacagctttatcaacttttttctttcgccagccttttcgataaccacctgtttttttaggactattttgtcttaacttatctacagcgatatcagctacatcttcttgtgcatttgttaattcttcttccacaacatttgcatatctttgtaattctctagcaagctctcccgcaaaatcgttcatattaaacatgctcctttgcgataatagtcaatgtttgatacatttcatcatcattcattggcggttcgataatatcaaagatacggcctttcatattgattcgcatttcttctgtaatatcagaagtataaggaatcacaaaacgataaacccgtgtagcttgtgaagctgaagcttcaatgtactcggaacctttcatcgtttttatcattgaccaggctttctttaattcttgccaagatgtttcgattacttgatttaattcatcttttattactacaggttgctcaatactaattcgattcctgaaatcacctgtattcagcggttttttatactgaaaaggacgcatattaatcaccgtccaacttaattgcttctaaagcttttccaatgcttaaactattaatctggcttaaaaaattcttatcaaaatactctaaggcatcgttataaacataacgagagcgttcaaagactaattccttgaacacctcatcaatattaagatcataattaccacaaaccctagttaaatctttattggatgcaaataggatgcgtcttaggtttgcatcttcatcatcacctaatcgcatcctatctttgaattgctgtaatatttcatttgaaattaccttatccattcacatcattccttatttagttgctggtggagttggtggtgtaaaagaaattttcaaatcataaacaagagctgctttattatcttttggtttaccattagcaaactgtttgattgtataaagcgtagcatcttcaatcgctaatgtttggtcaaactttttaagtttgtatccacctgctattgctgcgatatattgtcctttcacaaagaataatgcttttccaactggaacttcttcagattcaacagtttgaatgttataaggtaatgccattacccattggccattagccgtttgaattgtgttacgtgcttgtacaccaattgcatctacaggattgacaaccatcacaattttatttaacactttacgggattttcctttcccatcaacagataaagcttttactacttcataaagctcaccagcaattacttcaccattttcagaaggagcaaatgttagtgtaccggatgattttttatcagtaaccgcacctgtagttgcatttacatctttcattaaacctacaggttgatgcgctactgatccaccaccatttacaaagccaaactctaaaccaacagaataactttctactaataatgttcgaacataacgctctacccatactggccctaattcgagcatgtcatttggaatagcactaaatgcagttaatttaagttgtccaatttgttcttctctaaaggctgcatttatttgccctctaatatcaccgaataattctccccatgcatacgcttttgttgcgtcagaataaataaacttcgttactgctcctaaatcttgcattccaattgcttcaagtaatggatgttcagttactaaatcttcaaatacacgttcttgtgtagtataaggaagaattgaatcatccttaaatcccccatcttgtacaactgcattaaagaatttacgttcttcagacgttaaaacgttttgtccacgtgacgtcaaaatttgagcgtcttgcgcttcgatacgtgcttgtgctgaaatcttttctgataaatccgttacaagagtatcaaacatatcatcaaatgcagcagataaatcctccatttttgtatcttccgctttcaccagattcatatatgcttgttttttcgcttcaaagttttccattgtacctttaattttcataaccataattgtttcctcctaatttttgagaattaaaaaaaccttttccgtttttgattaccctccacttgtaaatgtggtggttctggattaggtttatttgataaattcatattttgttgtaagttattcgttaccctattaataatctgttccaactgttcatcagtaataccactatcactttctcgattatcaaattctactttgtcagcaaaaccttcttgtactgcttgttcagcagtaaaccacgtttcagcttctaataaatctgtaatctcttcacgacttttacctgttttttgctgataaattgaaactatcgactcatcatatgcttcgagtgcattcaatgttttttgaatatcctgcttgtttccataagctattgttgacgcttcatgaatcatcattcgtgagcctgtgcgcataacaatctcgtcagcagccattgcaataatcgatgcagcagaagctgctagtgatgtaacttccacaatgacttttttatctaagtcctttaagtaattataaatctcaacaccttgatcggcatcgccaccaccactgtttagtttaattttaactgtagatgctctaacttctttcaaagcgcttcttacactttcagcactaatagcatcgtaccaccaactgctactaccgatataacctgataacaccatttcgtgctcatcattttctggattaactgcattagaaaactgataaggaatatgttgtattttatttttcattcttatcacctccttcaattgaatttgcagattgataattcttcgtaattacaaattcgtctagttctggattattagagcgttcagcaccaaacaacttcctcacctcatttctagtgaatgcaccacttgctactaatttatcaacagcctcagcatgatctataatatctttctctttcacaccagttacttcaattttttctcctaataggaagttctttttttcaattaatttcgcatttaattcatcttcaatctttttaattagaggactaatacagaattttatataggctttaattgatgtttcgtagtctcccatatcaccacgaactaatgccgtaggaatacctaaaatattagccacatgatctattaaatctttttttaatttagatagttcctctacagaccttccattatttgaaccatcggcaatttccgtataattaaaaccctttatctttggaacaattgcaaaagcatttttacgaaacgccccaaacaatttatccataaagctttgtaatttagtaaggttttccccttccaaattctgtgcagattccatctcagcggttgcacgtatttgattagaaaacatatttgtctcaatcatacgactaaacagttgagtgtaatctttaaatattccactcatgaattttgtcaattcttcattgttataagtaatgtagataacctcgtccatttgaaatgacctttgaaacgtgtaatcctttacggttacatttttaaatacatcagggtatactgcatattcaacacggtcaaaatgatcagcaatgagtaaatcattttgatctgtaagaattgccaacacttcattatcaagtatcaatttgtacacaaaatcttgccaaaagtcagcggcactttgatctgtattcggtctaatattcaataagtaatgccagtcattatattgacgtgtatcctttttcatcatccgaaattcagacagcgaaacggttcgagcaataaaattaatacaagtttctaaagctactttttttaaatacgctctttgattcgtttcaataccaaagaaatcaaaatcatttagcatcgtattaatctctttatttttaccaagtacatccgacaaccaactcatatttcctcctcacccctttcttaaaagtttaatgcattcagcaagtctagcgctgcgccaacatctgtttctcttacctcatccgctcgatacatagcatgtacaaacgcctggaatccatctgtttttctacgaactggttctttcttctcatacattttatttccatcttttttaataacaacgagtacattattggtataccaacgcattaacggattatcaccaaatacaatttgacgatgtgcgaatgcaacttcaattctaggagcaagcaaaccatgaatagctctcggatttctaattacttcaacttcaaatccagcgtcctcaaaaagtgttcttaataaatctgcacgataattatccattatgatttttttgatatcataatagtttcgcatttcaacaaaccaagcaacgatggtatttggatcaattgtttcgccttccacaactgtcagaagatcttgctcttcccattctcgaattggtgcaaacttcttcttaccagctatttcagcatcctgttttttcgaataactataatatttatcaacgaattcctttctagcatacgaatgagatttccataaataatcacccttacttctaaaaagtaatccacatgatgcgaaatcacgaatacttgcataatcaagcgcaccaatacattcatgacctcgtaaatctggcaattcacgattagttgctgcaatctcttcccattttgcaactgacctttctaaatctgtaacaggtaaattcattcgttttgtcatgaactcttctctattacttgggtcatcttctaaatcttcatattcttcttttatagtttcaagtaacccctcagcatattcgctcaatggtttagataacataggattagcaagttcccaattatcaatatcatccacttcagtttcatcattcaatttacagataaaaggaaagacagcattcggacgtgcttcaccgttcaataccttcattgccttttctttttgcttatctaagaaaccgtcacgaacatatccatctgtaccaatataaaattcacgtgggtttttctttttccctaaaccactgatatgaacgcggacatctttattactttcgtattgatgtatttcatcaaatacaaccgcaccatcacgcaaaccatcttttgtatcaccgtttgaagtcctaaacttcagtacactttcagtagcctttgaaaccgtttgagttaacgtcgttttaaaggctcttttcaagacctcattcttcttcacacatttatgaacttcatcagggcttgttttcgcctgttcttcactattcgcaacaactgaaatgttatactctggaatgccatgtaattcactaattaaaaaatgaataataacagaaatcagaccatttttaccgccaccacgccctaacatccataggaatttacgataaaatacacgtccatttttcttataaaacaaaaagacgaatgctattaagaatttttgaaatggttgcatcggaaaataccacttctcaccgaagttaatacaatcctcaatcatttcatcatcaaaatacaaatcgtctctatttaaaacgtatttttctagatatccaattaacagttctctttctttattgaacttcactttcccacttcgataaagttcaatatattcttctacatatttttgcttaatcatgtaagatcacttttgttatatcctgtatcagggttagtatttttaacaacaaactttatatctctccctaacgcaattaaagaactgttaattttattcctctcacttataagagggtgggccttaacgaaaacttgagttccatttttgattgttacggattccccttctttagttatcgttttattaatttttcgaaatgctttaactagatcaatatagcgttccaccttttcaacttcaactaaatctgtcgtatcaacactattcattaactgttcctttaaccttacaatactaacagccatctacccacccccccttacgcgcgtattttcgaaaaaaacctgtcagttaaccccctcctccggtgccccttagacgaaatattgatgaaatattttaagggggggtgttattaccgaatcatttttaccacttttcatcgttttcccatttgttgattttctttttgaatgttctaccgtgttctttattgtggcaatccacacagattgtttctaaattatctatttctaatgcaagtgctggatgatgttcaagctcttttatatgatggacaacgagttgaatcttcttacgttttgcactctcgctgtattcattcgtgtctgtttgtactcggccattacgtttacattcctggcactcatagttgtcacgcttctttacttgttctcgtatactcttccactcaccactgtcatagaacttacgcttctgctgtttggttttgtattccttcattacacattacaccaccatctgcacaccacttacagcgtaatccatcctttgattttgctattcgttcactatactgttccgtatatccacatgctttacatctaaactgtacaatcttttgtacccttttacttcttaatagatcgtctattagtttgttcattaaacttatatcggcttctctctttgctgctggtgttagattgttatgaaatccttctattacttcaattaagattggcaacttctctacatctacatactcttcaatatcatctaccccaaccgaatgtataagcgtactaatcgcaattgctttctcaagtttagttaattgcatctatcctcaccccttacacttaaatcctttctccgtctgtctctttctagtaattcttttattgatgtttgttccaggtattccacggaataaaacataggtttcccaccatacagcttgtaatacttaacatctattccagcttttttatgcgctttttcaagaggtttaaggtatttgatatatgctttcttatcaatgagcataagaccaagcgcagcaatcttaccatttaaaacgctgtccaattatcctcaccccttatcttctaataaactagcaatcattttatttagtacacttaatgttgcttctccacactctttctctgttgcactgtttactatcggtccgaattcttcttctaatagttgtaagtcgacatgtttagcaagcacatcctcacctacagctataagaattgaactaacaatacctatcttctcaagtttagttaattgcatataccctcactccttatttatcaaatgcaacacgtttgcgcttatctttccttaacaacaaatataatttatatctgaatgtttgaattactatcattaatacgtttgacaatttctgaagccatcgtcttaccatttaaaacgatgggacattctactgtaatatctttcagtgcgctctttcccttaaacctactcataaccttttccaacttctccaatgcagccgtacattcattagcagcttccgttacttctttaattccttttaatgcttcagttgtttcaacatttaattcaattgttaatccttgaatattcttttttgcatcatgtgatttttgtgtatatttgttcattacccacacatctacaaaagcaccattacattttggacaaactgttacttcttgatattcttctttagatggatgataaactttatccatatgaccacatactaaacatttagccttattaaaatactttttcccttcattcaccttactcactccttatctctatctatatactcacgcttttcagaatcccaaacctcacaatagtcgaaacgttctttttcttcttcataccatttgattgcttcgtgcttagaattagttgttgtatgaatatcagcaaatccaccgcaaggataatactgatcgaatcccaaacaccaatatctatcatttaaattgatttcgtccatccttcattctccttcaatcaatttcttttacttcttctatcgcatatactatagcatccaaaatattttccccatctacctttttatttagagatttttgtaaattatcaaccgtagcttttaagccctctacagtttgagataatccttctaccgtttcctttaactcctgattatcggtaaataattgattaatcttctttttcaatatgatgttttgtaataacgcatccttcattacttacacgcaccacctatataatttttacataataaaaagcacccaaatcgggtgctcgatatactgatattcattaagaaaatatataaaaaaacagagaaattcacttccacctcttgatacgcatcgcgatgcgtgttataataaatatagaaagttgaaaggaggtaataacgatttctagtagggaagtaattaagaggttaaaaaaagaaggatggcttatagcgaacattgaaggcagccaccatcagttcaaacatccttctaaggttggcaaagtaaccgtgaaacatccgtgcaaggatattcccaaaggtacacttcgctcaatctataagcaagcgtgttggttataaaccgccccttgctttccctaattatacaagaaatcgttataaaaacaaattatgaaaaacatttcaattaatggaaaaccgtagagtttctatccttaagttgatgggcatggggtttccacagatgaatagtttttatagtcaagaagagttgagcgaaattggctttctatctgtcggggaaaatgtattaataagtaaaaaaaccagcatatataatccaggtgctatatctgttggaaataatgtaagaatcgatgacttttgcattttaagtggtaaaattacaattggaagttattcgcatatagcggcatatacagcgttatttggaggagaaatggggattgaaatgcatgattttgcaaatatttcatcaaaaacaattgtatatgcagcaattgatgattttagcggaaatacattaatgggaccgactattccacatcaatataaaaatgtgaaagctggaaaagttgttttaaaaaagcatgccattgttggtgcgcattctattatctttccaaatgtagtaataggagaaggagcggcagttggcgcgatgagtatggtaaaagaaagtttagatgattggtatatatatgttggggtgcccgtaagaaaaataaaagctcgtaaaaaaaatatagtagaattagaaaatgaatttttaaaaaatattaattcctgagtgtttaaaagattttgttgcagcatttctcaaaaaaataaaaaaagacatgtatgaggggatattatgtgattactgtattatttaaggggctatctttatagttgtctttgtgtagtaaagaggggtgttgtcacacattgctatcccaaagtaaaaaacgttattctttctaaataagctaaataggaaggaataacgttttttttatgaatttctcgattgaatcactttatatcattcaagtaacaaacaattataaaaaattgtttgttacttgaatttatttcgatttgtatagagttaaatttcagcctctagtgttgcgatatatataatttaagcttctattttttagttgcagataataccttataacgatgtcttaaataacaaaaactataagaagtaaattcaatacacacacacacacacatatatatatatatatagaaaaactaatgtaatttatgttaaaagaagagtagtaactttaaatatggaaaatgaaaaaaatttataggaggctgccatttcatacagtttggcggcgtaacgcaaatatttcggctaaattaatgaataaattatcggacaaaaataagcgctctaactttgaatagaacgccattttaccgtattacctggccccgaaaaggctcgaactcaatacctccaccctgtgaaggtggaggtttattttattacttttcttcctgcattataaaattccaaaaacgttttaattcttcacgcttttgggatggagcaagttttatatcatttaaccattgatctagttctttattgtttctgtccgctttaacattagaatctcgccctagaaggaaatcagtagatacattaaagtaatctgctatacgtatcaaggtattgtaatcaggttgacgttcattgcgttcatacataccaattgtactttcacttagtttaagcgattgggcaagttctttttgtgtaatgcctttttgttttcttaaatcacgaattatatttccaaacgttttcattctatcacctgataatatattaacacattatgtgttaaataattaaaatttttaaaagttgataattataatctattgacaacacaaattgtgcggtttatattttaattaacaacacgaaatgtggttttaggggtgaggatgtatgaattatgaaagagtagctgaaaatctaattaacttaagaaatggaagatccagagaagaggtggcaaaagcagtgggaatcagtattagtacattacagatgtatgaaaatggacagagaatcccacgagataatataaaaataaaattagctaatttctatggtgttacagtccaaacaattttttttgattcggaacaacacgaagtgtgttgaataatgttagatttttaagataatgtagtgattttttagaaatgtaagcttagaaaatgtattaggcaattttacataaaattataatgtttttatcattatatataaattatagggggtatttgcatgaacatgaaaacatttgaaatacgtgaaaaacgattagcagaactactaggtgcaaaagtactatgggaatttataagtgccgtaacagaagaaattgaaaagcaggagttagagtctacacctggattattagaagatctattcatacatgtgaaagaaacgattcaaattcaaaatatgaatcaacgcagaacaaaagcccctgtaaaaacagaggctgatggtataaataaagatacattatttatggaagcatatgtagaattaattaatcataagtttgttatttctgaattagctgtagagctttcatctgttctaaaagaattaaattgttttgttcaatcatctttgccactgcttcaaagtgagcttgattctcaagaacctcaatctgcttctctttagggagtgattgaagtatttcttttatttctttacactcgtatatgttattctccgagtcttcaattaatttattgcgtcgattggtgtattcaagtgcacctaaagttgctaatgcgcgaggatctaatcctagaatttccatgtattcctctcctttcctctacaataattcgataggggaaaggagattcctttaatgatttggtaaaattgtgaaaggtgacacttatgttaacttgaatatcttttactaacctattctgtataaaaaatagctgcactcaagtacagctagtcttcttcacaaacttagatggcctcgatgacaaattgggattgaggtatatatagtaattgggctgctaaggaagttgttgtgttagcaaatggatatgcttccttataaagaaatttactatacactatttcattcatttcaaaggtcgtatacagttttttaaggattttttgagaaattttatttgtgcaagcagcaataaaatcaaaatcttttttacttatctcttgaatggcatgtgaaagaagggtagtgactataccacttcccatccaatctggatgacaagcgcccatatctagatagaccaatttttctttatctaaatgagaaaactcaatagattctgtctctaatgtatctaaaagttgaaaaataggttccatttgcgggcatagttcaatcgctttctctgtatctattagtggctgggttactttttttgttaaaagaactccaacaatttgaaaattttctattgctacaaatgacatagcttgagatacagcttgtttcatcatttcttcgcacattttgtgaaaaggggcaaaaggaatttgtaaactgcttacaagaggttcattattcacaaaagaatgtgcaagtaaatgtgctgcatctttcacgtggtgtgtatcaagtagctctatattcatatgtttttcctctttcctgatatagtgaatagtaattaaaaggattaaaaattttatttcatttagttaagtttaactattaaagcgctaacaaatatggttatgatacatatgaatgaatctgtttagtggcaatcgaaatatgttcataaagaaattctacgatctcatctatacattcaacagttgtatatggagagatagaaaagaattataatgtagaaatcggatttctatcataactgtttattacatctactacacaagaacgagttgtatcaccaaaaaatacttgatcgcgattttttcctaggtaattaaatagttctatatttaatcggtttgtatcctcaatttcttcctttgttgcaaggcctattcgttctttttcccaattttcttggccatctccattcatatagaaacgaaaagttgtaattggtccatatgtaaaatcatttgtgattgcgacttgagggagggccttgcgcaacttctctctaaataatagatttacacgaatataatttgctaatattttttgatatccttcaattccaaaggctaatagattgatatacattggaatagcactaccagatcgtgaacattctaaggtatagcctgtatgataacttccatatgacctattaccaagataaggtgtgtcatcttgttcaatgtccatcagttgtaaatcagtatgattttttacgattaaaatacttgaagcataaggtgtttgtcctaatttatgaaaatcaaaacatacactatcagcaagtgccatgtattgcattttatcttgtacgtatagtaaagcattttttaagttaggttcaaatgaaagtggattttcttcgaaattataattattaaagaaactatagaatccacccattgcagaatccgcatggatataaataggttttaatttatattttttttgtattgcttcagcgctctctttaattttttttatatcatcaatggtaaaagtatctgttgaccccatagtagctagaatataaaggggaataccaccattattaataacttgtatcatctttgcctctaaatcatctatatccatagaatttgaataaggatccgttttcactttaattaagtgatttgatccaatgccagttgcttcagctgattttaataaactatagtgtgcattttcagaagcaaagcaatatacattttgtggagcaccatattcttttgctaatgggaattgtttagaaattgctaagcgtaagctcgaaaatacacaaccttgtccaccccatgttgtataaccgccgctattatgcggattataaccaatcagttttgaaagcatggatacaacttttacttctgcttctgctgcccctgggccatagacatcccaaacaccattaccatttaaaagagccatggttagttgacccaataatgacggaatacttggtagtggtacggcgttcgataagtagtatttatttggataaggatggccattcataaattggtttagctcttctataacctcagacatagtgatgccagctagtggaatatgactttggtgaattaagccattgtagtatccttctgatttttcctcacatttacctaaagtagctcgctcttcattttttaatcggtcaagatttttaattattttctgcatagattctaataaaagttgttgtttttcttcatttccgtcaacgctcggaaataattttaaaatatcttgcatgcagtcacttctccttgtgaaaaactggatttttattttacttggttaaacataagagtgtaataatttgtaatttcccttttgaatacttagaaatgaggagctatttagaaaaaaatgtaattccatagaagattatatgaattatagaatttaaagtaaagaaaaattttttgatttatttcaaaaaaattaattgtgagataatgaagcttctaaaaatatttctgaattaattgtttatttggtttgcatgatgccctagcatgtatttaactaatgtagtagatattttaatataatgtaaaacgtattataaggtagttgaataaaagggttcaactaccttataaactgtagaaattgttggggaaagataaaaaatagggtggaagtgctaaagatatgttctagttgggaagaagtagtagtatggatttggtagaaaaatcagcataatttttttatggaataataattattcgatcaaagttttttaatgaattcaatttcattgtctaataataatggacgagttaagtgtgaagagttttcttcaacctgagtagaattttttgcaccaggaatagcaactgaaactgctgggtgacttaaaacataacgtaaagcaacttgcgctaaacttcgatttgagcgtacaagtgaacgtaatttctctactgtgtgtaagctatctttaaaccatttttcttttggccaatcttttcttaaatcatcgtctggaaattgagtttcatgattaaatttcccagttaaaattcccatcttaagtggacctcttatcacagcacctaaattatgtttttcaatataaggaaggatgtctttttcaggttctttattcaaaatactataatcgaattgtacgacatctaaatcattagcctgattaaaatgttttatataatctaaatcattagtagaaacaccaacagctcttactttgccagagttttttaaggtttggaaagcttgtagaaaggcttctgtttcttcaggtttatcccaccaaatatgacaaaagtaaacatctatataatccgttttaagccgcagtaaactagcctcaaacgcatcaatgatcttttgaggatctccataaacggctggttgattggggtcataatgatgaccaattaaaccaccttttgtagaaaggattatatcttgcctgcgattatttatagcttttgcaacaagtgtttcactatgacctagtccataaacgtcagcagtgtcaataaaattgacccctagatcaattgctttctcaattgcatcaagtgattcattatcttttactgctccccattcatctccaccaattgcccaagaaccgaatcctatttctgaaactattaaccccgtgttacctaataatctatattccattatgtacggactcctcctttgcagcttatgttataagaagtatatatagtgaccagttggaatattcttgaatttattttcggagtataaattagactatttcctttaataaaatatgtaagattgctgtataaaaagaaattagaattattagtgaaatggttttttatgcttaaattgaataaaagtatgaattgatacagtataaatatgagttttattcataattttaataactatgcaataagcgaaataaatgttgaatttagtcggaaaatatagatttacaaattgcagaatgtgtacatatagttgtaactgtaaatattatccgtttttaaatatttataaaaggagaaattcatatgaaagaaatacaaaagaaatatgaaattgtagaagaattggatgtaacagtaggccaagaagcattatggatagctcatcaaatggaaatagaaaaaggaatgaacaatgaaccgattataataaagttaaaaggaaatcttcaaatagaggttttaaagaaaacgcttactacaatagtacaatcacatccggcgctacgtacaatatttaagaagagggatgaaaagataaagcaattaattcaaaggaatgtagaatttgatataccaattaaggacttaactgcttttaaaaacacagaacaaaaatctattttaaaaaatttcttagaatctatagttaatgagaaatttagtttagaagaggggcctttgtttaaattccacatcattaaattcagtgaagatacatttattttacatttaatgtttcatcacattatttacgatggatggagtttaggagttttcatccgacaattatccaatacttatggtgaattacttcaagggaagtcgaatgtagaatttgaatctccttataagaacctcgtagagtatgaggtgggttttattgatagtgcaatatataaagaaggatcatcgtattggaaagattatttacaaggtgaattaactcctacagagtttcctattgattttaataaaataaatgaaaagagatatacagataaaaatataagcaagaatattaattcggatctattttatcaaatacaatgttttgctaaaaaaaataatataagtatttatcgagtaatgttaagtacttattgtacattacttcatcaaatgacaaatgctgaagagataattgttggtattccaattaatactagaccacatacagaagaacgagatacttttggctactttgttaatacaatacctatacgtataacaatagaaaagggagaaacatttaagggaatacttaataaagtgaataaatctattcatctagctattacgtataaacataatccatactcacatatagtaaaagatttaaatctaaatacaaatacaaatcataatatggtatattccacagcatttaatacgatgaagataccggaattaaaaattcctgatattgagtcaacagttttaacagattgtaaaagagtaaatccttttaatatgacttggagaataatgcgatatgaaggggaaacagagaataaaattgaggttgactttaactcagcattatataaaccagagagtattagtgatttagtcgaaagatatatatatttgttacaaaaactaatgaagaatgtgaacgaacctatccattcattggatttacttgtagagaaagattatcgtctatacaaagaaatgaactcaaatgctcttacatatcctcattcaaaaacactagatcaattaatcgatctacaatcattaaaatcaccaaatcaaatagcgatttcaatgggggataaatccattacctattatgaattacagcaaaggtcaaatcaaatagcgaattatttacgtgaaaatgatttgaaaaagggacaacgtgtaagtattacaatggagagagagattgataccattgtatggattctaggcatcttaaaatcaggtggagtttatgtaccaattgatccaaagtttcctgaaaaaagaatagaatacatcttaaaagatagcgaaagtcaaatgattattacgaagaaagaatacaggggattggttgataggtttgcgattcatacaatttatctagaagattttcattacgctaattctatagaaaatattgcgtctacacataccatagaagatgcagcttatattatctacacgtcaggttcaacaggtttgccaaaaggagtcgttgtaccacataaaggtgtagttaatttatcatattcagtaatcaatacatttcatttaggaaaagaagatgtgtttttacaatttgcaacgatcatttttgacgcctccattatggaaatatttccgattttgctatgtggagggagaatgcatttaatttctgaaatcgaaaaacgttcagcagaggaatttataaatgtaattcaaaagaatggtattacaaatgtggttttaccaactgcgttttttaaattaatagctgatatgccaaaagaaatgttacttaaattaaattctgtaaaacgtgtatttgtaggaggggaaactttacctgctgaatcagttcgtaaatggcaaagtaaattagggttaaagattccagttcttaatgcatatggtcctactgaaactactgtatgtgcaaccatgtatgaagtaaatggtgagatacaaaaagaaatctctaatatcccaataggtaaaccaattgctaataatgaagttttcgtggttagtccgttcaatacattatgtccgtcaggtgtagtaggtgagttatttattggcggtgatggagttgccaacggatatttaaatcaaaaggaaaaaacaaaagaggcgtttatctctttcaataaatcctataatcatgataaaaagatgtattgtactggagatttagtacgtcttttaccgaatggaaatttagaatttatcggaaggaaagataatcaagtaaaaatacgtgggtatcgaattgaactggatgaaattgaaggaacattatttaaacatccagaagtgagagatgctgtagtattcacgtatcaaaacgacaaaatcgttagcttttatttatcaaaagacaatacagaactaaaacaagaggcattaaaaacattcttaagtgaaagtttaccagattttatgatgccaaattatgtatttcaccttgaaagttttcctgtatcaccaagcgggaaactagatagaaaaaaattagaattacaaatcccatctttactttcaaacatgcagaagcaatatgttccaccgataagtgaaacagaaaaaagattggcaaaaacatgggcagaaattttaaatttagggaaatatagaatcggcagagatgatgacttttttaaacttgggggacattcattaattgctgtgcaagtgttaaatcaaattcaaaaagagtttcatctaaaaattgaaattagagatatttttgagtatacaacgattgctagtctgtctgcttacatcgataaattaatggcagtaaatcatgatagggaagaacaggagatgcaagtattaaaagttgcagataaggaaagttatcagttatcaagtgctcaaaagagaatctggtttttaaataagtataacgccattaatagagtatatgatacaccactacacatatatattgaaccgagcttgaaaaaagatatcttacaagacaccataagatttttagttgaacgacacgagatgctacgaacagtgtttattgaaagaaatggggagcctagacaagtcattttaaactcaatagcgattgatttgattcacgatgagattgaacacatgactaaaaaagaacaacaagaatatatacgcacaacaataaatcaaacggatcatacaccatttgatttagaaaatggccctctttttaggattagaatttttaatctggataagaaaaagtcttatttatatatcaatttacatcacattattacagatgagtggagtgtaaggaatttattagatgaattaatgaaggtatatagtgcctttgcaaaacgtagaaatcctgagttgccaactatctctaatcgatatgtagattatgctgagtgggaacaggagcagttaaatttaggtcggtgggatacggaaaaatcttattggatggccgaacttgcagcacctcttcctatactaaaccttcctttagattttagtgggaatcgtcaaagtacaaataagggtacagtatttgaaatgaagttagataatgaaatgaaagagtctttgaaacaagtatgtgaacaagagaatgtttctatgtatatgctatttttagcagcgtatattcaattgttacattatctaacggatcaaaaagatattattgtaggtacaccggttgttggaaggaatcatcaagaatttgaacaaatacaaggattctttgtaaataccctagcaattagaacacaattgaatgatgttaaaaatttaacacagctattacaagtagtgagagagaaatgtttgaattcattccaaaaccaatcatacccatttgataaagtaattgaacaaataaatcctgatagaagctatggaaataatccgatcttttctactatgtttagttatcagaaagatattctgcagcaacatgatgcgtataagcttcagttgttacctaataaacaagatattagtaaatttgacatttctttagctgttgaagaaggattggattatgtagggatttcatttgagtatgatattaatcttttcaaggaagagtcaattaataggtttactcaaaatttacttactatactggacgcctttattcatcaacgaacagtagcatatgaaaatctttcattcctatcacaggaagaagaatctttatataaaaaggtaaatcatacagaaagaccctatccttattttcaaaatatacaggagcaattctatatgcaagtagatagacaatccaatcggattgctatagcgactgaaacggaatctttaacatatagacaattaaatatgtgctctaatcaagtagctcaacatttactcgaaaaaggtataaaaagaggtgataaggtagccatatttttagatagaagtatgaatagtatcgtttctatgcttggaatattaaaagccggtgctgcctatataccaatcgatgtaaaataccctaaggatagaataaattatatagttcgtgacagtgaggcatgtagaattataacgagtaacaaattcaaaaatcatttgaatgtaagtgattataaggtttcaataatagaggatatatatcgtacaactataaatgatgatgtgaaaattttaaataaaccagatgacttggcatatgtaatttatacttcaggctcaacaggaaaaccaaaaggtacattattaacgcataaaggagtattaaatttagttgaatggagaaaggaaatatttcagatctctccaaatgataaagtaacacagttttattctcatagttttgattcttcagtatcagaaattttttctaccttgttaaatggggcggaactatatgtattaagtgatgaacagcgctattcaactgtcgcatatgttcaagctattcaagaaacacaagcaactatttctgacttaccaacagtttttttcaatgaattatcaacttcattaactaaactggattgcgaaaagatacgttctttaagatttataataatgggaggggaagctgcatcaacaaatgctattagaagttggcaaaatacttttaaaaaccaagtacaactggtaaatgagtatggccctactgaagcaaccgtttcagcaatgtattattttataccagttttagaaggcgataataatcttttaggaagcataccaattggtattcctatttctaatacaaaggttcatatattgaattcatatatgcaacattgtccggtaggggctatgggtgaattatatattgaaagtttaggattggcccaagggtattggaagcaggaagaaaaaacaaaacaggcatttatttcaaacccattttcagaagacaatagtaaaagattatatcgaacaggtgatttagcaaggtggttaccaaatggaaatatagaatttatggggagaaaagataagcaggttaaaattagagggcacagaattgaattaggtgaaatagaagatgcaatgttacaacttgaggggattagtcaggctgtagtaacacaaacggaagatggaatgttactgcaagcttattataaaacagtggacggtatagggatagagaaaaataagttagctttacatttatcaaatgtattgccagaatatatggtccctaaatattactctcatgtgttagaaataccaataacggcgaacggtaaaattgattttgaaaagctgccaaaaatagagtttggtcatgagcaaaaagatgagtgtaaacttaaacctcaaactaaagtgcaaaaagacattgcaaaggtatggtctgaagttctaaacgtaaaatctataggtttaaaagatgatttctttaatttaggtggacattctttaaaagttatgccagcattagtcaaattaaaaccgttataccctaacttgaaaattcaagatttctttaagtatagaaccatagaaaaattagcctctcatattgaagagatggaagatatatcgttcaagaaagagaaaaatatgaatgtagcatgtatggaaaatgaaacgaaaacgactcgtgtttatgaaacaactaaattagaagaatgtgagttagatatggtgaattatccaaaggcagtttttcttacaggggcaacaggatatttaggagcacatattttagaacggttattacagttaccatctacgactatttactgtttagtaagaaaaagtgagggtcaagtaattggtgcaaagttaaaagaaagaatggagttttatttcggtaaagaaatcctccaaaagttgaaggagagagtagaattaattgaaggagatttatctttgatgaatctaggtctagattcaaagcaattggaccatttaaagaatagggtagagtcaattatacattgtggtggagaagttagacactatggagaacgtgagcattttcaaaaggtaaatgttcaatctacaaaatacttattggaattagctaagaacacaaaggcacgttttcattatatatcgactttaagtgtagtaggtcaggctgaaagtgatccaaaagaatttgaattctttgagtctaattttgatagagggcaaaatttagataatctgtacctggaaagtaagtttcaaggcgagaaaatggtcagagaagcaatggaaaaaggagttcgtgccacgatataccgtgtggggaatttagtgggtaactctaaaacaggtaaatttcaatacaatattaatgaaaacgcattttatagattattaaaagggatatgcctatctagcatagctcctaacgttaatacgtatgtagatttaacgcctgtagactatggaagtttagctattactgaattatcttataaggccaatacagtaaataaaaccatgcatatttgtaatccacatcagcttaaatgggaccaatttattaatagtttacaagcttttggatacgatatcctgttaatgaaacaagagaagtatatagagaagttttttaatacgaatctaactactgatgaacagaaagctttagagctcataatgcctttattagaatctgtagaagagttatcagtagctataccatcttgtttatacacgcaaggatatttgaagaatgtatattgtttagagccaaatcaagagtatatcaatttgttattaaattatgctatggatataaagtatttaccattaattaaagaaccaatactgttgtagtataatttatcaattttgaacaaaaaagaacctgtttttcattgagaacaggttctttttctggaaagagatctacttattggtatggaacagatttcttttcaatagggttgggaacgcactattgaaaatatgaatatacaattatgcgtttttaaagtaataaaatttgatatataattgaaaagtttttgatagatagttttaaattctttttagaaatttatttattaatattaaaaattgaaggtgataccttgaagttaaatgacatttaatgcattctagagggggagttaagttgatggaaaatgaaaacatatcaaagaaagaaaagattatgaatacaatattggagttaattaaagatgaacgtttgtaaaaggtatttattgaaaaaacgtttataaaataaacttaatcacctttataaactggatattccaatgtttcgtatataaaccctttttgtttgtaaagctatatcttcataaactccattcacttatcccattagttgatttaatattttagttggtattttagagaacatcgactttccgatgcaaaatagtccatatttagccagaaaatagtattagtgtacaacaaacatcttaatctatgtcaaaattttgtctaaacgtacaattttcttttttgatatggtgactccatgcccatcaacttaaggatagaaactctacggttttccattaattgaaatgaataaaaaatgcacctccaattgttagactgtgtctaacaattggggtgcacttcagtgctgagatgcactttgaacggctttttttatgagaattgtttaagtgctctttcggctagtaaagcaaagtattctgcacttataggcagtgcctcttcattaattgtaaaagcaggatgatgccattcatgtgtaccgctcgttcccataaagacgaatgaacctggtatttcctgttggtaaaatgagaaatcttctccagccattgacggactaggcgagatgatattaagattcatctttgtggcaacttgagtagataagtctgtaagagctttatcgttgtgaacagcaggaggacctgaataaaaacggaatttcgtttttacacctaatgcatcagatacacctttaataatacgctccatgagtgctggaatcttttcacgtgtttcagcttggaatgtgcgaatcgttccttctaacgtagctttttcaggaatcacgttccacgtatttcctgcatgaatatttgtaacactaacaactgcattatgagatgaacttatatttcggcttacaattgtttgcagtgccatcacaatttgagaggatgcgacaataggatctactccagcatctggtacagccgcgtgtgtaccaactccgtgaatttcaatttcaaatcgatcaactccggccatcagtggaccatctttaatgccaattgtacctattggtaaatcaggtttattatgcatgccgaaaatcgcttgcacattacgtaaatgtccagcatcaataactttgcaagcgccattactactttcttcagctggttggaatatgaagcgaaccgttccatttagggaagattctctttcttttaataagaaagcagtacctaaaatagcagctgtatgaaaatcgtgtccacaagcatgcattttccctcgtactttagatgcataggacaaatgtgtttcttcttgaataggaagggcatcaatatcagcacgaactgctacaattggtccgtttttattaccagacacttcagcgataattcctgtttctaaattggaatcaatgatagtaatgtttttttcttctaaccaattttttattgcttttgttgtttcgaactcttcatatgatagttctggatactcatgtaaatgtcgacggatggaaataagtttttcttttagttgatttgaaatagataccatgtagtatgccttctttcttcagcaaaatatttatcataagtatacaacaataaaagagaggattctcaaatgaaaatcctctctcgtttatcccataaaagcccgattggttcaactaattaaagtttcactttatgctgcgacttttttatgcgtatgatgtttacgataacgtccacgcattgcgtatgcaatttgcgggattgcaatcccaattaatataagtgatacaccgaaccattgtgaagatagtacagcctcttttaaaacgaatactgacataattgttgtaactggtagttccgctgcaccaagaatagtcgctaagccagaaccgatttttggaatcccgattgtaaaggcaatagatggaataacgatactaaatgttcctaatcctaaaccgtatttccaaagaccttgagaaatggcaccattaaaaataaatgttggtgggaatacaatcatgactaaagttaaagcaccagtcattaagagaacaccgcgcggtaatgaaggtacttcaacagcaacttttccgcttacgaaaatgtatgttgcgaatgtaacagcagataataaacctaaaatgaccccagtcgtatcgaaagcacctactgattgttcaagtaaaccacttgataaaaatgtccctacaagtaagaaaataacagaaataactttttctcttgaaggtaatgtttttgttgcgactgcttcaatgataattccgacccaaacgaattggaataaaagaataattgcaatagaagctggtacagtttttaatgaagcataataaaaaattccggtaaaacttgcagatgttcctgcaacgaataaaagtaatgcttgctttaaaggaacgcgatgtctagaaaatagaagtgtaatagcaagcaaaataatccaaccgaacaaatattggctgccaattacctctccaagtgaaaatccttctgcatatgcaagcttaacaaaaatagctaaaattccataactacacgctcctaataaaactaaaagagaataacgaagcatgaaaaattcctcccatctatatgaagttgttccgtatcgaaaatatataactagagggaagtatacaaaattagaaataaagggtcaaatgaaagaaaagtatgacattttatagaataataataaaagtatgatatttatgcataatcttgaaatttttaatagtagaagtattataaaataaactttgcattgtatagagatagcatttgaaaaaaaatattttttaaaccaatatgtatatagacgtactagtaacgtgctaattatttgagaaactatgttacctttgttatggtaataacaattaaaggagttttataatccatttgggttttttctatataatagaaggaaatgaaaacgttttattagaaactgtgaggaagtgcggtttttcttattgccacgttgtaaaagtgatttcacgaattgttcatagtatttttatgtgtttttgttacaatatttagggagaggagtggaatgatgcaagatattagtatttttttagcgtttggcgccgggttcttatcatttatttccccatgttgcttaccgctttatccggcatttttatcgtacataacaggtatgtcggtttctgaattgaaagaagaaaatgcaatgcttcgcaaaagaagtatgatacatacagcgtttttcttacttggattttcaattatatttattgcaattggatttggtacaagttttattggaggaatctttactgactataaagatttaatcagacagttaggtggtatatttatcatcgtgttcggcttaattattgtcggggtgtttaagccgaaatttttaatgcaagaccgtaaatttacatttaaaaatcgtccaagtggctattttggatcagtactaatcggattagcttttgcagcagggtggacgccatgtaccggaccaattctagtgtctgtaattggattagcagcaacaaatccagaatcagcaatgatatatatgattgcttacatacttggatttgcaatcccgtttttcgtactgtcattctttattacgaaaatgtcttggattaaaagaaatagtatggccttcatgaaagtcggaggatatattatgattgttatgggtgtcttcctatactttaactggatgacgaaaattatcgtatatttctcaagtttatttggtggttttactggtttttagtattattctgcgaaaatgttggaaatactaacggaaaagcatataatgaaagtatattttgcatatagccacaaaaaaggatgagaaaatatgaacatagttcttttatcaagtatcgttgctgtttgtatggctgtcggtgcgatgtttattcgtttaaaagcagctaagaaacctgcaacattgaaaaaaattatacttccaccattttttatgagtacgggtgcattgatgtatgttttccctgaatttcgattaactccagcagaaatgttagaagcaattggtgtcggtttgattttctctatttttcttattaaaacatctaaatttgaaattagaggacaagagatttatttgaagcgttcaaaagcctttgttttcatattaattggattacttgtagtgcggattgtatttaaaacctacttaagtcaatctcttgatttaggacaacttagtggcatgttcttcttacttgcgtttgcgatgattgtgtcatggagaattgcaatgtatcgttcctttacgaaattacagaaggaaatggaaaaagaagatggtttttataatgaaaaagatatgaagctaacttaaaaactgtatatgtaccaaataaaaagacagcgtcaaaggcgctgtcttttttatcgaaaataatatgaagttactttgcgagtaaagatcgatagttagaataatcaatctttttttcttgtagtttttttattaaaaatttatgatcacgctttggtgtggcaatgatatatcccttaataatcaagtcttgtgtaatttgagaggcattttcttgtaatgcaagttccccgattttgccagcaatctttgattttgcaacatcacgaaatagttctggaacaggacttacaagctcttctaacaattgtttttgttcatcatcccataaatgtctcgttttatttatgtagtgttcttcccaatccaaaatggacatgccgtcttcttttggtaaacgttttaaaaattttctgaacataaagtatccaccgatagacataagccctaataaaataaccgtccataatacaatgaaccaactgaaccatccttcgagcacgcatatccccccttaatgatagcggttttcttttattcatattatatacagtgagattcatagaaagcaagaacgcttggtcattttgaccaagcgttatagtttaaacgaagtatagttgttcaacacataaattattattatcgtcttcaacatactcaataataagtgtgccaactttacgatctttatcttcagttgtgaaaatagagtaagaagtaaaacgtgtttttgataggccgcttatatgtgtaggtaaagaaatgtagtcgttatcgcggaagaattccatcagttcaatatcctcaaattcttttcggtcaacttgtttgtttgtatagcggcgttgaagttgttttaaagattcattccaagaaattgcttttgtgtcgtataccattgttctatctccttactgtatgtaattactaagaacatacgttctaatctagtatactctttttattagaaaagggaaagcaaaaaataatgtaagcttggatttccaagcttacattattgatgcgtccgtcataatctctatttttcattataagttagatatgaataagaaacaagatgatatatataatgttgagagttttcaagattctgtatattataggtgtactaaagtgtaagggaatgagaggtgtggcatacgtaatttcactgcaagggccgatggctagcggaaaaacaacattagcaaaaaggttagaaaagagagggtttcgagttatatatgaaaatccatatccaattgtagagaagcgaaaaaaattgaatttagatatgaattcaaaagtagggtttattatgaatcaaaaaatgtttatggaagcaaaaataaaggagtttcaaaatgtgaaagattcagtcgtaatttttgatcgcggaccagaagacattgagttctttacactcttttatccaacgattataggagaagagtgggatatagaaactgaattgaaagatgaattatataaattaagagcatgccgttcggatgtgattttttacttagatgttacgaaaaagaatgtatatgatagaaaaaataatgatagaacaagaaacagaagtacgtttgaggagcaatttaaattagtagaaactgaaaaagactggtataaaaaatttcctgtaacttatgtggacacgaatagattaacagtggacgatttagaggtatattttatggactggttaaaggagagagggctatgaaaaaaatacttttatttgtatactcaacatttgcagagtttgaaataacagtagcgacggcattgctgaaaaataaatatgaaatcattacagcgggcttaactaaagaattggttataagtgaaactggattgcaagtgcagccgcatatagaagtaagtgaagtacgtgtagatgagtatgaggggatacttattccaggtggagaagaaggacagttggaagatgcaaaacctcttttttcaatcattcgtcaatttcatgaacaagaaaaattagtggcggcaatttgtgctggaccgtatgcactagcaaaagcagggttatttaaagggattgcttatactgcgactatagattatcaaaaatttgattgttttccagtagaaaatttcgtgtatgaagaagttgtgaaacactcaaatatcattacagcacaagggcatgcatttgtaccatttggaatagcaattgcctcttattttggagtggcagacgaacataatacagatttttattgtggtaaaggcaatgtagtaatggagaaacttttacgagaaaacgtgtaaaagctagcaaatgctagcttttttctttttgacatcgataaatggctaacgtttttgggtcacgccatataccgttatgaagtgacaattcattttctacttcttcttttagccataccttcatttccgcgtgaaggtatgtattatcaggtatatttagcgacggaaacatgctagaaatatagtttacaatcggagtagcatgatgaaaaacgagagcattatgaataactgtttcttcaacagttggaaaaacagattgtaatatctctttaccgttttctaaacaaaatggagtgactgatgatgttgttttcggtaaatcaaatgcgtctaacatacggttacacatttcaactatacgaggtagtgtaacgctagaatttgttgtagctaaaagtgttccgccaggacgaattactttatggaatccttgaatcgttttttcaacatctttcacatggtataacatatgtcttgcaattattaggtcataacaatttgtttcgaaaggaagtttactagcatcccctcgtttccattctattaagttatttgttttagcagcttcagcaagcatagcttcggattgatcaaacccggttaatgggcctttatgaccatttgtttgtaaaagggaaaggaattttccactagcgcacccaacctctaatatattttcttccccttgaagttgtaaatgttcaatgacgatcttatctaaatctacgtgtttttcttcgtaatgtgtatgtgtgtcgatgcgtgtttgtaaatggttgctaacgttatactgacgttttacatcattcattttgtcacattccacctttgtgcaaaattgttggattgcatgtgttaatacatctgttttctttaaaccttcgtaatggagtgctgattcaaaccttttaagtaatttctcttcaattcgaaaatgaatatattttcgttttgtcactgaaatttcgcccctttgcatctgttagtgagactatagcatgcttggaaaaattgtgtaaatcatttgtgtacacaaaattatggggatgaaaaaaatgtttgaatatgattttaaactattgacgatttaaacgttttcatatattcttaaattaagtaatattcaaataattcaaaagaaatgagagagtcacatgcttcttcaaggaacacatcgaattggtcgtatggccatgctgttggcacttgcggatgagaatgaaagtcctgtattatccattccaaaaggttggaagtattgtacggggaaagtgggttcgatgaattcgcaaaaggttgtcgcagcaatggaaacagcggctaaaagcaaccaagttattgaaacagacgtttacagagaaacacatgcactttatcatgcaattatggaagctttgtacggagtgacgagaggtcaaattcagttagcagacgttcttcgtacagtaggacttcgttttgcgattgtgcgcggtacaccatacgacggaaaaaaagaaggcgaatgggttgctgttgcattatatggaacgattggtgcacctgtaaaaggatctgagcatgaggcgattggtttaggaattaatcacatatgatttgcccatagtctattagttagaagggggccttacttttttaggacagaagtctgtcttaaaaagataaggtccccttttgcctttttaaggaggaaaaatgatgattacgttaacaggacatacattgacagttgaagaaatgaagaggttattactggaaggagaaggtgtaacagcttgtccaactagtatgcaaaaggtagcggagtgccgcgaagtagttgagaaaattgtagaggacggaaaagtcgtttacggaattacaactggatttggaaagtttagtgatgtgcttatccaaaaagatgatgtaaaggcacttcaacataatttaattcagtcacatgcatgtgggattggtgatccattcccggaagaagtatcgcgtggaatgttaattttacgagcgaacacgatgcttaaaggagtatctggtgttaggccgcttgttgtaaatatgcttcttgagtttgtaaaccgtaaaattcatccagtcgttccgcaacaaggttcacttggtgcaagtggcgatttagcacctttatctcatcttgcgctcgtattattaggcgaaggtgaagtgttctataaggggaaacgcgttcatgcaatggttgctcttacagaagaagggcttgagccaattgaacttgaagcaaaagaaggtcttgcgttaattaatggtacgcaggcgatgacagcacaaggagttctttcttatatagaagcagaagcaacggcgtatcaagctgaactaattgcttcgatgacaattgaagggttacaaggcattattgatgcatttgatgaaaatgttcataaagcacgtggttataaagagcaagtggaagtagcgagcagaattcgtgacattcttcatgatagtaaattaacaacaaaacaaggagaactacgtgtacaggatgcctattcacttcgctgtatcccgcaagtacacggtgcttcttggcaagttttaaattatgtgaaagaaaaattagaaattgaaatgaatgcagcaacagataatccgcttatctttgatggtggggaaaaagtaatttcgggcgggaatttccatggtcaaccgattgcgtttgcgatggacttcttaaaagtaggaatggcagaacttgcaaatatttcggagcgccgtattgagcgtttagtgaatccgcaattaaatgatttaccaccatttttaagtccagaaccaggacttcagtctggtgcaatgattatgcaatatgctgcagcgtcactagtttctgaaaataaaacgttggcacatccggcgagtgtagattcaattccgtcttctgctaaccaagaagatcatgtaagtatgggaacaattgcttcacgccatgcacatcagattattcaaaatgcaagacgtgttctttctattgagatgatttgtgcgatgcaagcagcagaatatcgcggaattgaaaacatgagtacagtgacgaagagcttctaccatcaaggtcgtcagcaggtgccatctattaaaaatgaccgtatattctcaacagatattgaaaatattgcgcattggttaaaaacgaattattcgataaaagaaagattagatgtaaacgcagcactataaaatgagaaaagggagagattgaaatggaaaaagtacaacaaacaattcgcgcgccaagaggtacagagttacaaacgaaagggtgggtgcaagaagctgcacttcgtatgttaatgaacaatttagatcctgaagttgctgaaaaaccagaagaattagttgtatatggcggaattggccgtgcagctcgtaactgggaaagttatcaggcgattgtagattcattaaaaacgttagaaagcgatgaaacgttacttgttcaatcaggaaaaccagttgccatttttaaatcacatgcagatgcacctcgcgttctgttagcgaactcaaacttagtaccgaaatgggcaaactgggatcacttccgagaactagagaaaaaaggtcttatgatgtacggacaaatgacagctggtagctggatttacattggaacgcaagggattctacaaggaacatatgaaacatttggtgaagcagctcgtcaacatttcgatggttcattaaaaggtacattaacacttactgctggtttaggtggtatgggtggtgcacaacctcttgctgtaacgatgaacggcggtgttgtcattgctattgatgttgataagcgcagcatcgatcgtcgtattgaaaagagatactgtgatatgtatacagaatcattagaagaagcgttaacggttgcgaacgagtataaagagaagaaagaaccgatttctattggtttattaggaaatgcggcagaaattttaccagaactagtgaagcgcaatattacaccagacttagttacagatcaaacatctgctcatgatccattaaacggttatattccagtaggctacacgttagaagaagcagcgaaacttcgtgaagaagatccagaacgctacgtacaattatcaaaagaaagtatgacaaaacatgtggaagcaatgcttgctatgcaagaaaaaggcgcaattacatttgattacggaaataacattcgccaagttgctttcgatgaaggtttgaaaaatgcattcgatttcccaggattcgttccagcatttatccgtccattattctgcgaaggaaaaggaccattccgctgggtagcactttctggtgatccagaagatatttataaaacagacgaagtaattttacgtgagttcgctgataatgaacatttatgtaactggattcgtatggcacgtcaacaagttgaattccaagggcttccatcacgtatttgttggcttggttacggtgagcgagcgaaatttggtcgcatcattaatgaaatggttgcaaatggtgaattatcagcaccaatcgttatcggtcgtgaccatttagattgtggatcagtagcatctccaaatcgtgaaacagaagcgatgaaagatggtagtgatgcagtagctgactggccaattttaaatgcattaattaatagtgtaaacggtgcaagctgggtatctgttcaccacggtggtggcgttggtatgggttattcacttcatgcgggaatggttatcgttgcagatggaacagaagcagcagcaaaacgaattgagcgcgtattaacttctgaccctggtatgggtgttgttcgtcacgtggatgcagggtatgacttagctgtggaaactgcgaaagaaaaaggcgttaacattccgatgatgaaataaggaggagaaaacatgctggacactttactaataaatatcggtcaattactaacaatggatcaagaagatggcttgttaagacgggaagcgatgaacacgcttcctgttatcgaaaacggtgcggttggaattgaaaatggtgtaattactttcgttggaacagcggaagaagcgaaaggattacaagcgagagaagttattgattgcggcgggaaaatggtttctcctggtctcgttgacccgcatactcatcttgtatttggtggatctcgtgaaaatgaaatcgcactaaaactacaaggagttccgtacttagaaattttagaacaaggcggaggcatactttcaactgtaaatgcaacgaaacaggcgtcgaaagaagaacttgttcaaaaagcgaaattccatttagaccgtatgctatctttcggagttactactgtagaagcgaagagtggttacggattagatgatgagacggaatggaaacaattagaggcaacagcacaattacaaaaagagcatccgatcgatttagtttcaacatttttaggtgctcatgcagttccgaaagagtataaaggtagatcgaaagaatttttacaatggatgttagacctactaccagaaatgaaagagaagcaattagcggagttcgttgatattttctgtgaaacaggtgtgttctctgtagaagaatcaaaagaatttttattaaaagcgaaagagcttggctttgatgtgaaaattcatgcagatgaaatcgaccctcttggtggtgcggaagcagcggcagaaatcggtgcagcatcagcggaccatttagttggtgcttctgataaaggaattgaaatgcttgcaaattctaatacagtagcaactttattaccaggaacaactttctatttaaataaagaaagctttgctcgtggacgtaaaatgattgatgaaggtgttgcagttgcgttagctacagactttaacccaggtagctgtccaactgaaaatattcagcttattatgagcattgcgatgctaaaattgaaaatgacaccagaagaagtttggaatgccgtaacggttaactcatcatatgccattaaccgtggtgatgtagctgggaaaattagagttggtcgtaaggcagatttagttttatgggatgcttacaattatgcttacgtaccgtatcattacggcgtaagtcatgtgaatacagtatggaagaatggtaatattgcatatacaagaggtgaacaatcgtggagcacggccactatttaaagaaaaatgcaaagtttattgatcgtgaagtgacgaaatggagtgagatgattaaagattgggaggaaggtgtggaaatattcggtgctgccttaattggagcacccctttctaaaccgtctattagtcattcaggagcgagttttgcgccaaaaacaattcgtgcgatgttagatgcatatagcacatatgcaattacagaagaacacgatatgaaagaaagtgtcttatatgattgcggcgatattacgatgcatgtgacggatataaaagaaagtcataaacgaattgcgaaaacagttgggcatgtaacgaaagtaaacccgaacgtgataccaatcgttcttggcggtgaccactcgattagttttccgagtataacaggttttgcaaacagtaaaggaaaggtcggaattattcaatttgatgctcatcatgatttacgtaatttagatgatggaggcccgtcaaatggtacaccattccgtagtttactagaaaatgatgtcattactggaaaacaacttgttcaaattggaattcgtaatttttctaatgcacgtgcgtaccatgaatatgcaatagagcatggtgtaacagtgtatacaatgaaagacgtacgagagcgagaaataaaagatattatcacggaaagtattgaagtattaagaaatcaaggtgtgacttctatttatatttctcttgatatggatgtgctagaccaagcgtttgcaccaggttgtccagcaattgggcctggtgggatggatagtacgactttactagatgcgattgaattccttggtaaagaatcgctcgttcaagggatggatatagtagagattgatccaactcttgatttcagagatatgacgagtagagtagcagcgcaagtgattatgagttttcttttagcgagggaaacagttagcaaacaggttagtatatagacggaaaagtagatatttatttatgccttatcaaaaacacatcactacttaaatgtagtgatgtgtttttgtgttaaaggagaatgaatgtgtgtggaaccgttaatggaattgcgatttttataatgtattgtgtaaatttaatttcttgcttctgaagtattgactcgtaaaataattttatgataaaataaaaattttgctaaaaaactaaaagtatgttaagcttgagaaggttaccatatatggaggtggattatttgtttcaaattggtgataatattgtttatccaatgcagggagcaggtataattaaagccatagaagagaaggaaatctcaggagaaaaacaacagtattatgttataaaaatgtcggctagtaatatggaactaatgattccagcagggagaatattgaattcgaatatacgaccagttacggatataaccgcattagcacacataatggatatttttcaacatggggaatcagatagattacttacgtggaaacaaaggtataaattgaacactgataaaataaagacgggtaaaatgcaagaaggtgctgaagttgtgcgtgatttaatgcgtatacagaaagaaaaagcacttaatgcaagcgaaaagaagatgttagataacgcatatgaatttttgattagtgaactgggattaattgaaggtatcacagaaaatcagataaaaagcttttgttaaggttcattacaaataatgtattatatcccaaaaaagatcttgaattttttgggaacataattatagaaaatttatcatttcaaagacattcaactctttcaaaccacttttagagcattacctctattgttattactacaatcaaatccatttttattttttaatttcatttatgaatgttcgaagtttaattgaatacttcgataaaatagttacttgatttttgcaatcctgattcacactggcacggacgaggagccgtaaggatgaaagagaggtagggctttcattgttttaggtatataagttattatttttagaagaatactgaaccattttcacttctattgataaggtgttttttattaaagagataaacgaattgacagccatatatggtcaacaaaaaaggtttcctcctaaggaaacctttttaatattatttgcagtgttttgtttttgaatattcgaattttttgttataaagtcgtaaaaattgacgttactatctaaaagtaagtatgatgcgattatagtaagattttttaggggggaagaaaaatgacaagttcaagtaataaagcagcgagtatttatgaaggaacaaatgtaaatgctgggggattttttgaaaacgttgaagaaacaaagttgtttgatccaattcaagttggagcttggtctcttcgtaatcgtatagtgatggcaccgatgacaagatgctttgcagataatgagactggagtagttggtgctgatgtagtggagtactacaggcgcgacacgtttctctataagcgtttagacgtgaagtgagagtgttgctgaaaataagccaatgactcctgataagccaatggaaaaggaagacatgaagcctgataaaccaatgactcctgataaaccaatggaaaaggaagacatgaaacctgataaaccaatgactcctgataagcctatggatcgggagggagaaatgaaaaaagataatgatatgaaacaagataagccaatgactccttgggaagaaatgaaaccaagtgacgaggggagtgaactttgttggcatgtagtgaatggaaaatgcggataaagaaattttttatagtagtacctgtattacttgggattttgtttgtaggtgatacaagtgcatttgctcaaggtaaagatgtattaagtggaagagtaggtaaagctcaatatggtagttcatatataacttcattaactgatggaaatttacaaactagtgatactctttctaatggtgaggtcataattgatttagcttctcctgttagagtttcagggtttaggtttactaaagttggtggctctagtaatagaatggatgtttatttttatacagagggtgctactttaaagcgggaatatagaaatactgatagtggttatctacaagctgttgatattaaaggtgttaaaaaaattggattgaaaaatatgagcaatggagattattttacacttgctgaagttaatttatatgagtatgaatctgttcctccatctgatattacggatttaaaagaaaatattaaacatgattcagttgaatttacttataaaaatccgaagtcgaattttagtcatttaagaatttatcgtgatggacaagtgcttgctagtgatgtgaaagaagaaaaattcactgataaaggtttaactcctgaaacggagcatacttataaatttgtttcggtttctcctgatggtcttgaatcaaaaggtatagagaaaaagataaagacagtgaaagagcctttgccagatgaaataaaagacttacaggaagatgaaataactcatacttatgtgaaatttagttataagtttcctaaaaataattttgatcatgtgaaaatttatcgtgatgataaagtgattgcggataatgtgaatgttgaggaatttattgataaaggtttaaaaggaagtatggaatatacttataaatttgtttctgtttcttctactggtcttgaatcaaatggaattgtgaagaaagtaaagactgatgaagaacctaatcttaataagccttttaaaccttctaattttgatgttacgccaaaagatggctcgttagttgtaaatctattaagtcaaaatttaggcgttccaattaagggttatcacatttttattgatggtgtaaaagttaatgattcacttgttacaagtcgttcttatgctgtgaaaggtttacagaatggtcaaacttatggtgtacagattaaggcggtttctaagtggaatattgaaagtgatttaagcaatgttgttaatggaattcctaaagtaccagttattcctgaggttacttttagttttggtttaggtgctttagttgatgggataacaaattggttcctggggatatggccgattgtggcatttagtattgctattccgttagcatttattgttgcgtttaatacgaaaaagttgtttatgaggtaggggaattaactgttaaaaagattataaaagtctactaattgttagtagactttcgtttgataattaaatcttcaattgcttcatctaataatttactcattggaatttttgttttatctgatagttcttttagttgtttgtacaattcaatgcggacggcatttgataatgcttttcttgtttttaatccacgattttcgctcatattcatcacctctaaacaaattatagaatacatccaatcgacttgcaattgaatgtagttgaatgtacaatgaatttaggaggtgataaataatgatactagtgaaaaaagttcgtcttaaaccaaatagagaacaagaaatgcaattatggaaatctactggaatagccagatgggcttataattgggcattatccagacaagaagaaaattataaacaaggtggaaaatttatatctgatggtactcttcgtaaagagttgacacaattaaaacaaactgaagaatatgcttggttgtatgatgtatctaataatgttacaaaacaagctgtgaaagatttatgtgaagcgtataaacgtttttttaaaggggttgtagataaaccgagatttaagagtcgtagacattctaaaccatctttttataatgataacgtgaaattaaaagttatgaaaaatatggttcttattggaaaagtaggttgggtgaaaacatctgaatgtataccagttgttaataaatattcaaatcctcgtattagtttcgacggaaagtattggtacttagctgttggaattgaacaagagattattcatcaagagttaacaaatgcaagtatagggatagatgtcggtattaaagaacttgctttttgttctaatggaatgaaattcaaaaatatcaataaaacaaaggtagtaaaacaggtagagaaacgccttcgtagattgcaacgtcaagtttctcgtaaatatgaaataaataaggagggaagctgtttcgtcaaaacaagcaatattataaaacttgaaaagaagatacaacatttacatagacgtttgacaaatatccgagataatcatattcatcaagtgacttgtgcaatcgtgaaaaccaagccttgcagagttgttatggaaacgttgaatatcaagggtatgatgaaaaataaacacttatcaaaagcgatcgcacaacaaaaattatatgattttaaaatgaaaatgaagtataaatgtgagaaatacggaattgaatttgtagaagctgataagtggttcccttcgtctaaacagtgttcaaattgtggtgaagttaataaacatttaacgctatccgataggacgtatcattgtaaatgtgggcatcatatagacagggatttaaatgcatctattaatttgtcacgctatcaattagtaaattaacactaaaacgttattgctaatatgtaggattcgttgtatccgaatttacgcccttggagtgttatgtcaaacgaaagtagcttcggcaaaatcggacacgtagagtagggaagtaaacagactttataaagttttataaggttttggcaacggtgcttagtttgatacaaccagttacaactaaggatttaatacaatttctacagtatgcgttccatgctggggaagacgtattatttctagcgtttgtattaatgattacattctctgttgctataagcattagaaggattatggtgggttataagcaatcatgatggagaagtttgttaagttcttaaaaggtggatttgaagcggttataaagtcgttaaaaacgtttattgattttttagctacaccatttcaatatctactggattttttaaaaggaatcttttatttcatagaaaagctgtttcaagttgtagtagcaattataaaattattcgttgccttgtttcagtttttaggtgctgtaatagcgggattctttaaaactttatttctatgggtacagcctaattttgatggtgggaatgtatcgtttcctagtgcatcaatgaaaggatttaaagtggctactgatatattacttcctactggattacttacagttattccggctgtggtcacatgttttatttggtacttgtttgttaaaaagctcatggatctattcagaggtggtcatcattaatgaatgcgttaattgatacaatatttaatcctgttcttggttggcttgcacaaatggcaaagtatttaagtgatttaagcgtaccggcaagccgtcctttgcgaattagtgattaccttggagtatttgcttatttatacggttggacaaccgtcataacgacgttattcgctttagttttcgtatattttgtttgttacatcatcatgacttacagtagtttgtttattcgatttaaagatacagtgaaatggtggtaatgatattgaatattgtagggcaagcaattttattaatattttttacgacagttgtttcttggatggtaatagatacattgaatttctttagagggatagaagaatgatttatgcaattttgggattcattatttggattttgattttgatttgtgaagcaacatcgggaaaaggagagttaaaataatgcaggcttttaatgcgatgtttgagttatcaagtgcagtttgtttatctatatttctttttatagttttaccatatatgtttttcaaaaataaaatgtcaaagtgataaaaacgaatgttaaatattaattagtttatatagttcgttaaaaggattcaaaatgtcatggcagcgggactagatccaagaggttttgaaatgaaaaaacgaacgttttggaggtttttataaatgttagctaaaacaaaacgaaaagtacagccacaatttgaagggcatagagcgttgattattaaggaagaaggaacatgtgtagttgaacaggtcatatcgtttgattcggagattttagaaacgagtacagccatgttaccacgtgaaaatgaattgagattacttgatgataatcatggttatgtgtatcacatttataacctagaaaagcccgcaagaattgaagcggaaaatttgaaaatgttacgtcgttctagtgcgttaaaggggatttttgattttgatacagggaagaaaccttttgacattattggttttatgccttgggtaattattgtattgctagctatttttaaataatggggtggagtaaatgagtgttcaggaaatgttaacgaaagatattttagaagaagaaggttcaaacgaaacgattgagactgttcaactgtttcaattcatgaaaaaacatgctgtgccattaacaaagaaacaacaaatggctatgttattgcttaatgaaaatggattatcggatatttccttatatattgcgggaatgaaagaagaagtattgccattaagtgaatatcacaagacacttgagaaattaacgctttcggaccgaattaaaggtaatgctaaattaagtcatttactgaaagcaaatgcgaatccttcattatcattgtcagcaaatagcgcaaaagttgttaaagggaatgagttagcatgaacataatggtttttgagggctttctcggtagcggtaaaacgtttggtatgagtttgtttgcaaaacactatgaagaaaagagtggctgtgtattgtacagtaattacggtttaattgggtctaaaccatttgtaactttagatacgtttcatgatattgcaaaagagaaatctagtatcttaaatctcgatgaagcgcatattgatcttgatgctagaagtttttcaagtaactcggtaaagttcttttctcaattgtcttattaccttagaaaactacgttgtacgttgtttattacctcaccatcatttgatgatttagattcacgtataagaggtattacaaacgttctcgttagggtatcgaatgataaaaactatttttattacaaaatgtatgatgttcaatctaaacgatatttaaaaacaatgcgtattcaaaagaagaaagcttttgctattggttcaaaagtttatgatacgacagcaatggtttctccagtacaagttccagataaacgacaagacttcatggaatttttagaagcgttgaagtcgaccgccgaagagtacggacgccagtacaagcattcagcgtaagctgtatgcgcggtgcaggcgggaggacttcataagattatataaattaaataaggaaggtacgttatagatgggaattttaaagaagaaaaaatttagagaagaagtgaaaagaataaataaagcacatggagaaatgagagaatttctagatttgctcatggatcgctacggattagatgaagaagaagtaaaaaattgtgaagtaattaaacatcattttgataatttagatttgatgtttagtcaaatggcaaaataatgttcgtgatttaggtgtgaaatgtaacggcagccgtgcatattttccaggggcttttaatgaaaatacgaacattaagtatgaggtgaagagatttgatacatgtagattggttgaaaactatggcgagagacggattattttatggttcattcattgctgtaattgttttcttgctaaattggtttacgggttaggttttaaaggtcttccttcgcttttgaggttggagattggctggggtgtggggctagccccgcatagcgtaatgggtaaatagaataaaagaaaatataaaggtcggtagtacaagcgtttaggctcgtataatggataggcaagttgatagttaaatatattcacttttgagtttatcgacttggcgatgaagacaaacgagcctaaaaaagttatgcaagaatgtagcgtagcggaaaaggtggagattttatgaagcagagcgtaagaaaatactacctgtttcttgtttaaccttttagcaaatacagatagagggttgttttgatggagaatgttattgttacgttgtttggtactctagggatttgtttcttgtttaaaggcatgctagatactttaaaagaagggtgatatttgtggatttgcctgtttgtaatgaaaaagaggtaactgttttatctaagacattgaaatatttgagaagtgatcaatctaatcaagttaaggtacataaagagtatttagaggacagaggttggatttttgatgatttaacttatatagatagcaatatctatgtagtttataaaaaagaggttgtaaagcgaaataaggcgttttaaggggtgtatatatgtttaaaaagttttatcgtgaatatatccatgtattgtttaatattgttgcgatgtttttttattttagttggtgtttagttggtgctgaatttaatttattaactctaatagcaattggaattgccctttttatttttgttaagtatgtatctatggataagaaatttgttaatgaaaatatagataaattaaaagacaaaaagatgatttttaggaaatatgctataagtggtgaagatattggatatgcagtttttacaaattttttattgtttattttgtatttaggaatatccgtatattttaagcctttaagtgtaatggctttattatttgcttttattgttaatgttagttttcttatgttaactcttagaataatgagtagattaagtttaaagaatagtaaagtttaagaggtgtatatatgtttgctaagtattatagccaagatgatgaatttatgtcgccacttcaatttatagctttgggtggtattatgagttttcttattaaatttggttgtatttcgcctagtgtgaatatgttaacgttatttgttactttcgttacttgtattggattatgttatttttttctacttttaataacaaagtatttttatagatttcttgctaaacatcgtgataatttacatgtttatttatgtaataagtacaatgaaaaaatagcaaatagaatcggtttatgtattggtttagtttatattgtaggggtgttagttatatgtttgctgatttaaagttgaattttaaattttggttaactgtagtttttgatatatgtatgcttgcaatgatctgtgttgttacaacaaagtatgtatctgatatatatagtgatttgtttattttcacgacaggatttttaatactattaatttggtattctgttagagtgtatttgatagatttaatcagaaaaaaacctatcaataattaaaatttaatatttttttattgaaaaaccatatgtttttatttacaaaccatatggtttttgttatattaaatttagttaattgataggaggttgtttttatgacagttaaagaaaagaaaaaaacttgggcatttacatttactgaaagtgaaattcagataatagatgaaattgtagatatagagaatgatagaagacattcaattgctagagaacataatttaccgtttaaaaaatataatcgttctacatttgtgcttgcaatgattgaagaaaagaaacgtaagtatcaagagcaaggagaaatttaatggaaattgttttaggtgttagtgcgtttggtttgtatatttcgtttttaatatttttatattggatggcattagattttttagcttggttatataaaaagatttaataaaatcgttattttattggttttctcttaacttgttaatattaataggggataaacgctcacttttttatttctacttttgaggaggtggttttgtggtcggttcttctgatttatctcgcattgtttcctcgagtcttggccagtttattcttgtttgttgtactgattcttctgtccatctgggtctcctagttccttatgatttggctaagaaaacttctttttttacagttgacaatgacatgggattttcattggatgatttaggtgttcatagtgatcagatgttatttatttttacacttgaatctgtattgatatctattccttttgatcaagttgatagagttataacttttactggttcttgtatagatcattataataaattttatgtagaacctaatgaatttttgaatgaattcaaattatatatgtctgtttaattattttacttggaaaggtgtttgtttatggctttagacgtttctaagtgtggcaaaaagacagcacatctgaagtctaaagaaactggtaagcattatgctaaggctttgacttgtaataaattagaatgtcctagatgtcagccagtaattgccgcacatatacaaaagatggttcgtttttattctcaacgtgaacgtttgtttttctttaatactcttacttcgactgatggtattaaggatttggataagatttttagtaaaattagaaatgagttgaattttaattttactttggaaggatatatgaaacgtaagaaggttagttatgaaaaagctttgaaatggtatgagaagaagaaagaaaaaacaattctttctgatgttgaagtagaattgtttagaatttctcgttatgatgctgttatttctgttgctaagcgtaaaaaagtttattataagaatttaagttctgatgataaagctaagtttaaggatatatatagtgatttgatttatgaaaggtttctttgtatttatgattgtaagtgtaaagatcagtctttaagagatgaattatataataatatttctaagcgttttgtagaaaatgaatttgttgattttaaatttattagagttttagagtttcataagagtggacaacctcattatcactttttgagtaatcgttatgtacctcatactttattaaagaagcttactgttgaaggtgtgagtgaagtttatgataacacttatattgtagaagatgctttgaggaaaaatcctgatttaacttatgattctgttgatactgatattgtttctaattatgtttcgaaaatcactaattatgttacaaaggatacaatagatacttttttaactatgcaaggtgatggtgatatttctaaaaagcttattagttctagtaattctattaagatttttaaagagaaagatgaaaaggatttaaaatatattaaattgggtgtttttgattatcaattaaattctagtagttatgagattcctttaggttttgagaatagtgctgaagattttataagggtcaattcttatatgaatgctgatccacatgcagttaggttaagtcagcttgttaaggaattagatttgtctgatgaaattaagtatagctatatgattcacgaaagattattagctatatcttcagttgattttatgatagagagacttggtaattatcgtactgaaggtttaacttttgatcaagtaaggttacttaaatcatttattgataatcgtattaccttgcttttaggacgagctggaacgggtaagacatatactcttgttaatttattgaagcgtttgaatcctaatccaactaaaactattatttgtacttatactggaaaggcttctagtaggattagagagttattaagagagcaagatttagaaggttataaaccaatgactatacataaagcttgcgcttcgaattttagttctaatttttttagaaatgaacataacgtaattgattgcgcttatttgattattgatgaagtttctatgattccacgtgaaattttagcgaagttgttacaggctgttccgagtcatgtgaagattatttttgcgggtgatgatgcacaattacctcctgtgaatgatacaagtattattcctgaattagaggcgttagagtttgttaatactattcgtttaacacaagtatttagaagtggtgatgctgtccttaaacaggcttataatgtattagatcataaattgattaattatgacttgtatgatgaaaatatggaagagttggtgcagagacttgtttttgaaggctatcaaattttaactaatacaaggaaattagctaaagatataaatttgattgttcaagctaaaaagaaagatattacactttgttttaatgattttaagtatgatttgaatgatcgtgtcatgattattgctaatagttcagcaagaaatgttagtaatggtgatactggaagaattgtaaattatgatgatcaaggtgtttgtgttcggttggatctagaagatagagatgtattttacaaatatgaagatactgaagaaattgtaccggcttatgcatttacagttcataaatctcaaggtagcgagtatgagaatgttgcagtatttgtagatagtcagccgaaattgaatacaaataatttattgtacacagggattacaagagcgaagaaaagtataaaggtttatgttcctaatgaaatggttttaactaatatgattaatacagttcctgagcctgtatctaatgtgacactaaataatgtgtttgacgtagttcatggagttattaaaatggatgagaaaataaaaaaagaatcttctcattagaaaacaagaagattcgtgtgagttttcgaattgactagagacgaagactcataagactaaattgattgattgtacttgtattatacaaactttataaagaaacgtctagaattaaagtcagatttatatctgacttttttgtttgttgtatatgaaaaaaatcagaataaaatcagaaatgtatatgaataaaatatgatataattcagatatagactaaaaaaggagaatgattgattgtgaagattgttgaaattattgacttgattaatagttctatgactatgccagatatggctaaaaaattaggtgtaagtaaggatactttgcgtaggcgattaaattcagttgggtatgagtatgataattctaagaaaaaaactttatatgttggggaagagtcagaaaaaaatcagatagacaacagattgttttctgatttaaataagaaagataacagaaatgaattgaaagttatcagaaaaaaatcagcagaaatacagaatgaagaaaaacatgttgtaaatgaattcagaaatgagtcagaaaaaaatcagagtaaagaaaaagaagttttaaataaagttagaaaaaaatcagaaaaaaatcagaatgactttactgaatctgaaattttagctttgaaagatttattacatatagtaaaaagtgatgaggctaaattgtttttagagttggcttcacttcctgaatcaaaggaaagtaaaaagagtagtattgttattagtaaagaaatacatgaacaatttgaagagttctcaaaacagtttgcaggtaaaaggatttcaaagttttcattaattgaattagctttgtatgaatttatgaagaagtatagttgagagtttagactctcaactttttttatgttcggttttttatgagtccatttttgtttatagtagacatgatggtttttttagaaaaggagtaagaaaaaagtgggcagacatcgtattgatccagacgaaaaaaaggtgaaattaaatgtttctataaagaagaaatatgttgatttagtaaagcaacaagaaaatcaatctgaatttgtagaaaatgctattgtagaacatttaaaaaagcacaaaaagatttaaaaaattttttttaaaatttcttcttgtattctgtccctttttttgctataatcagaacgtaaaatctggactcgaaaatttgttcgtttttatgttcgcaaaattagaatatggaggtattataatgccaatagttaaaattgaaggcgtatttatgggcgcaagtatggttgaaaaagagtttgaagggaataaaaaaacaactgtagttgttgatttgtaccaaaaaggtgaaaaagggaatgagacggttagggtttctagtaaagaagtaacgttgttcccaacgatttctggtggctacaaattaggtgatgagtttaagtgtctagcatctgtaagtgcatataagaataatgcatattacaatttgcaacagattgttaagtagtacgaggacttataagactgaagtgattgtgtgattttatgttagataaaatcgatttaaacgacttgtacaaaactatttcggaaatcatgccaaactacttagtacagactaagaacggtagttttgcagttttccagacacttacctatggtgatatgttaattagtttcttgctattactaatcttgttggtgttaacattcaactggatttggagtgctttgcgatgattgaatttaatttagaaaatttattaaaccaatattctctatttggactcccatttttgttaatcattgttttcacattgcttaaagattggcggtttgataaatgaatgatttagcctttttagatatgatgtattggttttttatgaacaattcagttgtattatactcgttaggttttataacctttctagtattcgtaataatgatgttcaccaccgtcaaagcttggggtgatggctattagttttagcatggacgtgggaagaatcttgcagtatgccttcaacatgtttagttcagtgttaccagtgatttatttattcattggtggggcgtttgctatctactgtatcggtaaagtgtataacacgtttagaacttaggagttgataacaatgcctgaatttggtttcagaccatcgatgtctcaattattcggtaatttcaatatgaactggaatacaatgacgccattgttagttgttttgtttgggatactgtttggatttttcgtagcgcatttagtaaaagacaaatttgatgattgattaattaggaggaatttattttggaaatgccaaaaattacattgacttataatcttgcagacgttgctaacggtttgactaactggttaggagcatattggccaattatcgcattctctgtagcgattccattaacgttcttagtggcgtttaacactaaagacctatttactcgttaatcatcaaataatcactccttaaatagcaagaagttaactataaatttaataaaacaattaaatagctgggctaataacctagctatttttgttaggaaggattgatatgaaaaagctagccataatttttttatgtgcattttgtattgttagccatacgatccctgtgtttgctgattcacctagttttcaattggtaggtagtaaaaatgtaacaatcgaaaataatgggatagttaatggtaaatacaatttaattattaaagttaacaatatgaaagatgtatatagttttcagttatcggaattgatgcttgttaatgattgctcgttccatgttggtaaatcaaagtggactcgtccagaacaagaaaaaaacgagttccctattaactggaatcagaatggtacatacgcattttacatttttcataatggtaaagttttaggctatgcacgttttaagcttaaaggatttaaagaaaacggtggcggtggaggagaaactgtatattggggcaaaggtgctaaatactacgatttacctgaaattgaaaagcctaatcctgaggactatgcggattatgataataagaatgacggagtttgtacaaatgaaaaaattccagatgataaaccacaaggcagcggtgatatagatgaatcaaaagaagataataaaccacctgtagatggtggcggtggttctgataaagctgttaaagaagttttagaaaagattgttagtgcagtaaatgaaatttcaaagaatacaggtgaaacggctaaaaatacaggtgagacagcaaagaatacaggtgagattaaaaagaacaccgatgaaatagcaaagaacacaaaagaaattgcggatgctgttaaggatattagggataatttgaagattcctgacgatatggatttgtcgattaaacctgttctacctgaggacattaagcctgataaacctaaacaacctgataagccttttgaagacaaacaagagcactttaaagagggtgaacaagagaaaccacctgacaaacttcctgttgctcctgagcccgctgaatgttggggggatgtttgtaaagataaagataatcagaaagaagaagatatgaagaaagaaaaagatatggataaagaagaaccaatgaagcctgataaaccaatggaaaaggaagacatgaaaccagataagccaatgactcctgataagccaatggaaaaggaagacatgaagcctgataattatgtacctctactagcctattaaaatatttacctattgacacgtaataacatttatgaaatatgatatacaaaattttctaaaattaactattgacaatttggaaaatttattggaatttccaaaaggaaaagtgtgacaagatattccaagggtgctataataggaaatgagttgaaaacgaacacgcgttttatagatgttcggtttttgtaacataactgtaacataaaaacatttgcattactggtaactttcgggtaatattggtagcagagagggacaaacgggacaaatcgagacacgatacatactctctatacaagtgaaaagaaggtggtgcatatgtaatatgagtaaactactgactgcgcaagaggttgcagacttattgcgtgttcataaaaagactatccatagaatgatacattctggaaagttagacgcttctaaggtagcaaacaaattccttattaaagaggaagatgcaaaaggactattggaaaataaaaataaaatggacaattaataggaggaatattcaatggaaaacaatactaaacaattaaataatgaggttaacgaaatcgcggtagtggacgagcatgtaaatacaaatgacatcgtaacagtggacaaggtgtcaccttcaatctttgaagcggacggagcgaaggatgtattcttctcatctattcaaagtaaagatcgtaaatcagctatcaaagtttataatgctattaactctagtgagaatgctctagcagatcatagaggtgaagtattagaaatcacggacatggttgctcatgctattactctacaagatgaattgacaaaagaagatgtggatgcattacgtgttgttttaattgataagaacggtaaagcataccacgcggtgtcacaaggggtcgtatcatctattcaaaagattattagtattgtaggtccagcaccttggaacgagcctttagaaattgttccggcagaagtgaaaacacgtaaaggatttaaaacattaactcttcaactacaaggctaatttttgtaacaaatgaatgagggtgcacattgtgtatcctcttttttaaaacataaaaggatggtgcggtcgtgaacgctattaaaaacttagttcaagtatctattcggacaaatgaacgagaactggaatttgtctcttttaatggaatggtgcatttgaagcaaaagttagaagaagatgaaacatccgtcgtgttaacaaaagaagagttagacatggttgcagctatgtctaattttgataatgtgatagccaactttatgaactctattacagaaaagaaagccatgtaagccaaagacctgtgacctagttgttacgggtcacatggctttataagtaggtgatacaatggcaaataaacggttaaagaagaaattagaaacgaaacgtaaaaagtcgttacttgtttcagaaggttatagtaagaaagaaacaaagaagctgaaaggtagagagttagaaactgtttataaaaagaaagcgcataataggaaaaatagagagcgtgctagggaaatagcaaatctagcaagacagtggggactttcaccgagtaagtttaattcatggaaaaagttacttccggaaatagagagaataaaaaaagaacaagatagggaagcaccttttctagtaatatactatcaggactttacaggtgagacagacagtaagtttatatatgattttaaaaagagaaacaatacaagatcacgtagccaaattactaggtctataataggttggttgcagaacgcccagaacaaactatttttaggaagggttgctatgcggattgtcccaaaacgtgatgtatctaaaaccaatacactttggaagaatcacggctatgtaaagatatatgagggacaaggaaaagaacttacaaaactattaacagcaatagaaacgataatggttggtgtttacgacgtaaaagaccgtgacaagtatttaaagcagttattaaataatcttcgttccttaccatataaacaagcacataggaacgctaatgagattcagaagatatatgatactaaatcatatacgaaagaaagttgggataacgatgagtactactaatagaaaaaagcgtagagagattaaactctttacgctagatactgaaacacgtggtttggacggcgacgtgtttcgaattggactattcgatggaaaacaatactatactggctatacgtttgcagacgtattaccagtgtttgaaaagtacaaagcatatgactgtcatgtatatatacataacctagacttcgacctttccaagatcatagcagagttacgtgattatgctgaaccaacatttaataactcgctatttatcaatggtaatatagtaacgtttaccgcttctcatattatactacatgatagcttccgattgctaccgtcttcacttgaaaacttatgtagagatttcgaccttttagaaggtgggaagatggatattgtcgattatatggaagaaaataattacggtatttataatgtaaaaaaccgtaaattgaacaagcgacttacaaaaggtaatttctttacaacagtagataaagatgaccctgtcctatgtgagtacatggaatatgattgtcgtagtttatataaaatcttggaaattgtaataggcctatcaaaattagaagttgaacaatttattaattgtccgactacagcttccctagctaaaacagtttataaagaacagtataagaaggattataaagttgctatttctacaaaacaatataatcataaacaactaggaaaaggtttagaggcatttattagaaaaggctactatggaggaagaaccgaagtttttacaccaagaatagaaaacggataccactatgataaaaatagtttatatccatatgttatgaaaatggctgaaatgccagtcggatacccgaatgtactggataatgaagaagcagaactttcttttgatctatggaaaagaagaagatatggagcaggctttatacatgcgaaggtacatgtacccgaagatatgtatattcctatcttacctaaaaaagactatacaggtaaattgattttcccagttggtaaaatagaaggtgtttggacatttccggaactagctttagcagaagcggaaggttgcaaaatagaaaaaatcgaaagcggtgttgtatttgagaaaacagcacctgtctttcgtgaatttatttcgtattttgaggaaataaaaaatacaagtaaaggtgctaaacgagccttttcaaaacttatgcagaatgcgttgtatggaaaatttgcaatgcagcgggaacgaatcatgtatgctgatatttctgagagagataaacttgaagcagaaggacatacagtaagcgagatcatatatgatatgaatggaattcgaatggaatttttagagtatgacggatatgctatggctgaatatattcaaccacatatttcagcatatattacttctattgcaagaattctactatttaaaggattgaagtatgcgcatgaaaaaggaattttggcttattgtgatacggacagttgtgcaacaactacgaaatttcctgataaaatggttcacgataaagagtatggaaagtggaagttagaagggtatgttattgaaggactctatttccaaccaaaaatgtatgcggaaaaagctattaataccgatggtgaatatgaggaagtattacgaatgaaaggtgttccgaaatgggttgtagaggaacaactagactacaattcatttcgtaaatggtatttacaagtaaaacgtgggaaagccgaaattcctatttataaaggcggggaacgtgttcaaaaattcttgacgaaatctaaaaataatatagaaatgaacgaactagcggaaatgcataaaacaattaattttgctagggaacaaaaaagaaacattgatctaaataaaaatattacctcacctctagttcgtaatgactatggggaaaataaggacgaaaagtcagagtatgagtttgacgaatggtatgaaagattagaagagtttaacgatgatatgaatgcggtagaggaactttgtatgaagtttggaaagatacaaataccagagaaaaagcaaaggaagttatacggactttataaagagtattcttcaaaagcgaaagctatgtgtttttcaaatgagggacttccgattcaagattggtgtaaaaagacaggatgggacatgaaagaactattaggcgaattaagtttcttataatagggagtgacgaaaaatgttgacgccaagggaacaggatacgttagaatgtataagcgggtatatggaagagtttgggtttgcaccgagtgtgcgagatatggcgagtcgaatgtacgtaagtcataagacagcacatcgctatttaatgcaattggaaagtaaaggacgaattaggagagtgcatcaaagacctagagccatccagttgttataaggaggggaaaggtatgcgtgacaaattgctcgactttatcatcgaactatcacaatctagcaaacaagtcgtaagcaagtcgtatgtcatcgacaggttaatgcaagtaacaaaagaagactacaaggaactagaaaagaaaacagaaaatgcggaaaaggactagcaaagttgctagtcttttttatttgtccaaaatgacacacgtgtgacgttatgcggaacaattgttcgtattatagtatacatatacagaacaaacattcgataaggagtgtgacagatggattgtaagacgttagtaaagcgatatgaagaacaaaatgaagaactacgaaaattaaattctattcttacaaaacgaatctatcatttgctacaagaaaatgaatcattaacaagtcatgtatcgtttatgagagatttcaatgaagaattaatacgcgacaacatgaattatttaggcgataaactagatgaaaaattacaagatatagaaggagatgattcaaatgacagacatgctaaaagcaattgaagaaaacccctttctattacgattcggtgacggacaattcttcgcgcgtaagaaaaacgaggaagaagaggaagagatcgaagaggttgaggaagaggaagaagaggaagaagaaaagccgaaaccaaaacgtaaaccaaaatcaaaaagcgaggaggaagcaccagcatgggcacaaaagctgatagacctagtaacaccgaaagtggaggaacaacagggaacgcaaaaagtaccggtaccaccgaagccaaaagtagaggaagacgaggagccggaagtggaggaagtggaggaaacggacaagccgaagaaacagggcttcctaagttggttcctgtagacgttcctggtaaagaagtggaactgtctggagaggaaaagaagctagaagagaagcgcaaaaaggacagggaacgaaaagcccgttcgcgcgcgaatacaaaatcttccccacgatctagcgggaaatcaaaagcaccgtcaatggaaatcttgcaattgaaaccaattctaatgacagtgtcacaaatggtggctacccgtgaagggtttgaaatatgggctttaagtgaaacagaaattaatacgctatgtgaaccgatagagaatatgttagcaaaaaccgcagcactcgaaaaagtcggggaaaatagtgacgcgattgcacttgctatcgcatgctttacaatctttgtaccaaaattcttaatgtggaatgccacaagaaaacagaagaaagcgcaggtggtaacaaattatgctaaatcaattcagcctaccggaaacaccggggcaaacaaaacaggaacgactggagcaagtagcggaccaagtgttggaaaaccttccacttccagtcaagcttttagcggggaactcaatcaactcattccggcaagcgctccattttgaggactttgacgaacaaatcgacaatggacttgaaaagctgaaagaagtgattgactatgtccaatacggtacttatccgggcgagtaggtgtatctattctattccgcttgatgattggcgtacaaattggtgtccgtgcttaccaaaactggacgagtggtttgtaacgattggtgagaaatatgtggtctttgaatacggcgatatctgtcaccgtatggacgagcattattttaacacgttactaccacgtatcccctattcgtcacgatttaaggcgttacgaaatggaaaaggtgtattgcgcacggaaaggagttacagcaagaagggaatgaagaaacatgcaagcaatcccgactgaccaacatgtttttatagctggtaaaacaggtagcggaaaatcgtttcttgctgaggtttacctagccgggtacgaccatgtgattatgttagatacgaaaggacagtcacttgagagacggaagaaaggcgagaacctatggtatgggttaaaggaagggaaagactttgtactggtcgagacactggaagaagtagccgaagcccgcacgaaaaaggtaatttattgtccgattccggaagagcaagatgaagagtattatgacgcgcttatgaaatgggtgtatgagcgacataacacaattttatggatagacgagttaatgcaagtttgtccaagtccaagtaagtatccgtatcatatgaaacacctctatcagcgaggacgctttgtggattccgtcgtatgggcatgtacacaaagacctgcaacgattccatcggatattatgtccaactctacacacttctttatttttgatttgaataaagtggcggatagaaagcgtgttgccgatgatttggggtctgatatgtttatggacaaaccgggttatcgtaatttctggtacatgcgggatagtgacgacgaacctgtccgcgccactttgaaactttgaaagggggtgacaatgtggagggtaaatttgcaggggtcggactgaaaaatattattgtcctatggctcatgtttatcttattaacagtcatggcgaaagcgattttaacaaaacatccggtgaaaggactaagtgaagttgtccaagccgtataggaggtgtgacatgcatttattagaagttattgttccgacggctatgtcgtcatttgctctagggattatagtaggagcgaacatcatgaattgcaatggatttaagaaaaagtaagaaaaaggaggaaaagaaaaatgggaaaactatttagcccgtcatggtgggtatctatgtttatcaacacatttgtgacaatgattttcatttatttaattaaaaaaggttctgataagtataatattccggttgtaagaccgattgcggaggcggtataacatgcatgtagttactatttatgatggaaatatgaatcgtattaatacacatttcacaggaacgaaaccgacatttgaacagctagctaattttaaaagtcgttatgaaaatgcggaatatgtggaatcaaatgaacgttttgctgactttgaaattcgtgaaggcgaacgaaaagaacgtttagcgaatgaagcaaagcaagcggaactggaacgaatcaaacgtgaacaaggcgcgggaagcggacttgttgaaggaggaacaaactaatggcacaacagaaagagcaatattcaccgcaacaacgcgcaatgatctgggcgacgtcaacacgacaatacaaacaaacattaccaacgcaagttgttacacaagaaggtatgacgcttgatttcacattaccgaaagcgcgtctattaacaaaaatcatgctacatgtaaaagccgtagccacgttgaaaagctctagcgggaacattcaacgcgacccaatgtctccatatggtattttacgccgagtagaactcaacttaaataacggcttcagtccttatattgtatcagggaaagaactgtttatgtataacgttttacgtaatcatccggacgtattgttaccaggtgcgaataaacaatacttaaactatgtggaaaacgtagcaacaacagccgggaaggacaatgaaattcaatttacaatcccaatccctgttagtttaaatgaacgtgacccggtcggaatggttatgctgcaaaacaacacggctaacgtaaacttatcaattgccgttgaccaattagcaaatgcatataaattaaatccatcaaataatgaccaagtcatatttaaatctatgtccattacaccagagatcgaaacattctctattccgtcgattccgggcgggcaaccggatatgtctgtactgaaactcgtacaatcgaaatcggacattttcagtggcggtggacaaaacattttaaaactaaacgtagggacgatttatcgtaaactcatactctacatcgaagacttaaacgggaaaccattagagccaaaagacttcacgggtaatatggaacttgtctttaaccaagcggacacgccttataatatcaagccggaaatactcgtacacgaaagtcatagtaatctaggctatccacttccaccgggtatgtattgctttgacttctcattccaaggtgtaccaaacctcggagggtcacgcgactatgtggatacggagcgtttaacagaattctggttccgcttcagcacgcaagtaggcgggaaagtcactgtcgtatcggaaacaatatcacgactacaaatgtaaggggctttatgctccttacctatttataaggagggaacagaatgggactgaatcatttctatcacgatctatacccggatacgggtttcaatacgacaagtggaatcaccgtagcggaaatgggtgaccaagttgtattagtggatgaaaaggacatcaagacagatgtgaaaccgaagtccgacccagtgacaggtgcaagcatttggaagtccattggtttattcatcattatcataatcgcattcggttatgtggcggggaggttgtaagtcatgaatgagattgctcaattcattagtcaagtgggattcccgattttcacggctatttttatgatgacaaaacaatcaaaggatacacaagctatgacgggtgcgttaactgatttaaagatagcaattgaaaagaatggtggcggtaagcatgagtaaatcattaatcctagttgttgccattcttgctttatggttctttgtaattcgaaagaaaaaggcgtgatgacatgtgaacaacgacgcgaaaggtttaacgtttctcactctatcccttttatttttatggctcgtgtttgacgactttgtcggaaagaaacgtctatcaaaattggcgcaaatgatgacgccggacttatcaatgcctagcccgggggaagttgctgagaaagtggtggacggtgcgaaagagtctgtaaaagaaacaacaaagaatacaagggaagcgcaaaaagaagcggataaaaaagcgggtgaaattctgtttgaaaaacctgcaaagaatgaaaaagaccccaaaaagaaagaagtgttagaacgtctttccgaacagagcaagaaacgtgccgaaacgaacgcgtataaagataaggggtggctcggatacagttgggaggacttattcgaggatacgtggggtacggtgaaagggtggtttaaatgaaagaatttacggagtcaatgccattcgtcatcttctttatgtccgtgaccgtcctattgcaatcctttacgaacgagcgtgtaacaaatggatttttgctactcgtattaatgagtatggttgttacaaattcggacaagtttataaaactattaaatgaggtgagagtatgacaaaagtattcgacatgatcgcgggaattggaatgctcattggtatttatttgttcctttcaaatggtcgagaaacagtgtcaatcattgaagcgatgggtaaaaactcaattgcgggcattaaaacattacaaggacgataggagggttttatatggattacaagcgcgacaatttaaatcgtcacgcgttccaagcgttggacaagcccgtatatgaaccctctatcagattgaacgtggagtttgacgagtacctcggctcttatgcgttactggtgaagcatacagcaaagcagccaaaaatggttgtggctgacccggtaaaagaaccgtgggagaaaacacgaccaaacttgcaaaacgaacaaatccgaagagaggatttcccgcaaggctactatttcgggaatcccattatgggggtgtagggaatgccagaatttgaaagactcgaccctcctgcaagcggtgggagtggcggaaaacataaaccgaagtttgacaaaaaacaaaagatgctattactaggaggcggaattgccgtcgtcctagtggctctttttatgaataaggcaaagcatagcggtggttcatcgcaagaagccgtagaggaagaattgaaggactactatacaaactatccaacgctcggtagtcaaaatgctgttgtgcaagatggaatgaacacgcttgtcgggcgacaagaagaattgcttaattccattttagaactgcaagggaagaaagaccctgctgaactaacaaagatttatgtcacattcgataacagtgatgaagcgttaaaacgtcaacaatatttaattaattctggagcaagtacgacatatgtcagaaaacaattcattaaagatggatgggcgggcgcgaaggattactatgttgtggaagcatacggaaaagaccgtcaagaaatggctgaccttgtgaaaaaaggtgtccaagacaaacaatggggcggaatggaagtcgggaaagtgaagaccggggacgcaccaagctatggcgcacattctaggagttattaattaatggctctagatgttagaccattcataaacgacgcccaacgaatccaaaaagaaactggaatccctgcttctattattctcggtcaaatggtgtttgaatctagcggaaagaatcccggcggaatgtccggtcttgcctataatgctaagaatctatttggcattaaaggtgtcggacctgccggaacacatactgtatggtcacaagagtatgacgcgggcggtggtcgtgtttctggattccggaaatataacagctactatgagtcgatggctgaccatgctcggttgctgcaaacaccgcgctatgcgtcccaactaaaaaatgcgaagacatttgaggactttgcgcgcgggattaaggcgggcggatacgcgactgaccccaactatgcgggacaattgatatctattattaagcaaaacggattagacaagtatgacgacgggacgccatacaccggagagggaagcgttcctgccggtggagggagtgataaacgtggaatattcacaagtgtcgctaatggagtcattcgcgccttgcttatcttattggcttttgtggtttgtgttctcttttttgccaaggcattcccacaagtggaagctacggcaaagagcggagcaaagaaagttacaaagtcatcctcacgatctagaggatataaaaaagtaaaaccgaaaggcggtgctacgaatggcggaactacagggactcaaactaaacgacaagttgaagcaagtatatgacaagacgttatcccttggtttgcgattcacaagcggataccgccccggttctaccggaccaagcgggagaccggatagccattcccaaggcatggctatggacttcgcgggttcgaaagataaaatggacgaatttgcgaaatgggcgaaaacgtcaccgctatttacggaagtgttatggcaaactgctggacactacgatcatgtacacgtcgggtggcaagagggaaaacaccaagccggaaagatgtacgtaggcgataaaacattgatcgacaggcccacgggtgacggtggcggtgccctaagcacggggacggcttccccaaattccgacaaaggatttatcacaagtgcatttgttggaatcgttcgtgctgttatgattcttgtctttctgatcgtagctgtatatttcttcttccaagcattcccggatataaaagtaaaagtattttaaggagttgaaaaacatgttaaaggataatacatggcgtgaggtcacgctcacactaccgcctaaaatggcgtatacacatcatttcattgatacaaacccaaaccattatgacattaacaatctatctgtagcgacgctatacgcgggcgttcgtgtcctaccaagtccaagagaatacgaattacttgtaccgggtaatggacgaaacattttagcaaggaaagaaggttcttcccaaatccaaatttataacgatagtgcggatgctgcaagaatcattttaacatcgtttaacgaaccgtttaaccctgctgtactagcaaatagcggaagtgttgccccgatttcaaacggtggcggtggggtaagtgataccgtcacggtaaaaggatttacaagcgcgttacctgctgggaataacaatataggtaaagtagttgtcacggaaatgcctaccattccaattgagtttaaaacattaccatcgggtacaaatatgattggtaacgtaggtgtcacgaaactaccgccacttgctgaaggtgaaagtcatatcggaagtgtgaatgtacaaggtggggtttcgatttccagtatgccacctgtacaggttacgaatgacccggtgcgagcaagtcacttctatttcgaagcaatgatcgggacagggaactatgtatgcaatgtaggtgacgtcattaaattctcgtacttagtgaatgaaggtgacaccgatctattcctaaactttgatgataatacattaaatccaaatttattatccggtaagaatgtaaccattcgtttgaaacccggtgaacaattatcagagtttacgagaaaagcaaataaaataacatttgtgcgccaatccggaaatggaatggttcggctgttaggggtgtaatagatggggcttgttaaaccatttccagttatagaaacaaaaacaaagaggataccgcaaacgagcgaaagacctctttattatagggttgctagaatccaatcaagaaacccagttgatagcgcggaagggtctgttcttcaaggacaacttttcccgcaaagtaactttggattcacgggtacaacgcaaccgttatacaccttttcatttggtgttcgaaacggcgggcccgcttcacttatcaaaccatccctactaaaagtaggagattcccgcgaagatagttaccgttttgaaatatacaaagacggggaagggtttcatgttctttatcttgttctatctccctattcaaagggtggtgtattcgtctatcatgcaattgaatgtaaagagtattttgaggtggacacggagtttaccgaacgtggatatacccttgtttggtcaagtgtaacaggtgatacacaaggcgtatatgaaggcgggcgaagactattaacggaaagcaaagccgaagaactctatttgaaaaagaatacaattggattccgtcaagtggcactagaccccgcgacaggtttttaccatcgtggtgacgggttactttataccaagcgaggggacattgtaacactattcggtgacctgctacatggtaacggtggtgcttataaaatcgtgggacgtgtaccgaaagagtttgccccgttatacgaaacagttatacaggctatgtattcgaaagctgattccacatatggaagtatgacaatgatcgtagaccaagccggacaaattatacaaatggaaaatagggtgaatggtgacccgaacgcaacaaataccaaaatcagtggcacatggcaatgtgcatattaaagggaggaaaattagaatgggacaattaaaaacttttcacgctgggcataactactttgtgacaggagcacatgcaaatgggtacaaggaggaagtcgaaacaagacgagtcgtgcaaagaatcgctgaattatgcgaagagaacggaattcactatgcaatcactacagacaacgacggacgcacacaacgccagaatttaaacaacatcatagcgaattgtaacagccatacaagagatcgtgtggacgtagcgattcacttcaaccaagcaacgtcagaaaaaggcggtgtcgaggtttggtattatgaccaatataatttagcttctaaagtgagcgaagccgtggcgggtgcgctaggtatcgcaaaccgtggagcgaagcaagggaaggaattagcggttctgaatgggacaaatgctcccgctattttaatagaggttgcattcttaaacaatccggggaatatgaaagcgtacgaggaacgatttgaagccgtttgccgcgctattgtccaaagtgttacagatgtaaatctgaagaactatcaggacttacctgtcgcaaaagcggacaaatattaccgtgtgaacttcggtgactttgacagctttgattggttagcgggtgtaaagaaacgtgtaaacgaaatattaccgggtcacggatgttggattgcttgtctagccgggaacgctcatagaatcctattaggtgactatggaagccgagaggaagcacaagccgtaattgatagattgaatcaagaatttccgggtagtggaatttggttagaagaattgtaaaataggaaagagttgtggaattgattccatgactcttttttattttgtttatatcgtgaaacatagatgtttatttgtgtcaatgggtaatattggtaaaagtgctagtagggatacataatttagtttgtctagcatctaaaataaaaattgacgtttcacgttgtttgtttcgtttagttttcaaagttcaatatcgcgtttcagcgacttttataatttaacacttctcgttaaatctgtcaacagtttttttctttcgttgctgacgacgcttattaatttaccatattaatcatttaatagtcaacactttttaaaaaaatgccaaaataattttatcttggcatgatataaagcttaataatcactaatgctgccacacccggtaagcctaacaaactcgttattgctgctgtccccatgttaatcgggatatgaaaatcaaaatatgtccctacaacatttacgataaaaagcaatgctattcctaaagtaacatgaaaaatcaccttacctataaaacgtaatggcttagaggcaacaccaaaaacaagaaaaataaatactaaagtaagaatgccaacaataataattgtagaattcattttttcctccttatgaatgacctatacatctatttgtatgggacaagacaataaaaaagaacagttatcatatgcagcatctcttttatataaactaaataaaacgatacctcagcatttaacaaataaaataaaaaggcctgcttagaaagcagaaccttttaccattgttccatttttacaggacgacgctttgcttctttcaacaaaaagaaatatttcgcctctgctattttcaaagaacaaatgacatcttgagacggttctacactttgttcgaccattctcttctgacgtaaccactcattcttcactttttccaaaagtacaattaacttatcgtcatactctttacgcaatttaccctttttttgaaagaacattttcgtttctcctcttatacttctctgcgaccttctaacgctttggataatgtcacttcatctgcatattctaaatctccaccaactggcagaccatgtgcaatacgagttactttaatgcctgtaggttttaagaggcgggagatatacatcgctgtagcttccccttcaatattagggtttgttgctaatatcacttcttgtaccgtttcatcatgtagtcgctttaagagttgcgggatattaatgtcttccggtccaattccctccataggagaaatcgcaccacgtaacacatgatatacaccttgatactctttcattttttccatcgcgattacatctttcggttcttgtacgacacaaacaactgattgatctcgatgtgaatcattacaaatataacaaggatcacgatcagtaatatgtccgcatacagaacagtacgctaaatctcgcttcgcatttacaagtgctttcgcgaaacctaacacatcatcttctttcatatctaatacgaaaaatgccaatcgaaccgctgttttcggtccgatacctggcaacttcataaaactatcgattagttttgatattggttctggataatgcatgtatcaatatcctcctagaacattccacctggtaagtttaagccttttgtaaatttacccattgtagagtttgaaagctcatcagcctttttaagtgcatcatttgttgcagctaatactaagtcttgtagcatttcgatatcttctggatctacaacttcttctttaatcttcacttcaagaatttgcttgtgaccatttgcgataactgtaatcattccgccgccagctgtaccttcaactgttttttcaccaagctcttcttgtgctttcgccatgtccttttgcatcttttgcatttgtttcatcatgttattcatatttcccattccgccacgcatcataattaattcctcctaattattattactcttttatttcaatgagttcttgccctactaatttcactgcctcttctataagaggatcttcctttttctctgggctttcttcagactctccaccttcacgttgtaaaaagtcttcacggattttaccccattcactttttggaatggcaatcatatttaaccttttacttagcaattcaaataaagcttgttctactgtatccatagcttctcgattttcgctcgccatcttacagtgaatctcatattgaaatgctaaaacgtaagtgtcatctgaagctgccactggttcgctattttctagtaaaacagcaaacgctactttgttatatgatttgagtcttcctaacaactcaccccatacagcttttaattgttctaaatcttgacgcttcgcttgttttaatacttcatttacacgtccgacaggaatcttcatacttcctgttcttaccggctttggtgttgcacgtgtctctcttacttcctgttgtacaccagctggcacaccgttctttttaacttgctctaactctttctccagttgctgcatcctgttcataattgcttgcaaacgatctgtaccatttgcttgcatcataaactgttgacacaattgcaccataacaacttctaagaaaatacgcggatgatttgtccacttcatttcctgttgtcccttactaagggtatgaataatctcatagatcacttccggttgcatttcttcactcaacttacggaattgatcatctacaattactcgttccaacatatgttctagttgcggtgaagtttgatataaaagcatatcacgataatagtaaatgaaatcctccataaaacgaactggatccttccctttactcatcatttcatctatgatttgcaatgctcttgatacatcattttcacgtatgcattctactaaattgcctaagtattgctgagaaacagatcctgttacggccaatacatcttctgtcgtaacggtctcatcactataagatatagcctgatcaataagactaagtgcgtcacgcataccaccttcagcagcacgcgcaacaatttgtaatgcctcatcttccacttgcgtaccttcatttgtcacgaccgttgataatctctcaacaatatcattcactgatatttttcggaattcaaaacgctgacaacgtgaaataattgtaggcgggatcttatgaggttctgttgtcgccaaaataaagataacatgtcctggcggctcttctaaggtttttaaaagcgcattgaatgcacccatagaaagcatgtgaacttcatcaataatgtatactttatattctacagcacttggagcatattttactttatctctaatatctcgaatttcatctacaccgttatttgaagccgcatcaatttctaatacatctgaaatggatccttgtgtaattcctaaacaagaaggacattcattacaaggttcagctaccggagcatgttcacagttaattgcttttgcaaatacttttgcaattgtcgtttttcctgttcccctcgggccagaaaataaataagcatgtgaaactttctcttgaagaagggcattttgcaacgtttttgtcacgtgcttttgaccgactacatcttcgaacttttgcggtctccatgttcggtataacgcttggtatgacacgaaaatacggcctccctcaaaggttattatctcatttattataacccattctgtttatagattccaaaagttattttctatacaaaaaactcacctttgtattaaggtgagttttgtatacatatataactgccgtgcaccctccgtcgattacgtaccataagcgttactcaagcagttagctcggttcaggcactcctgcggcacacgagaagacccgcttattgctgcttccttccggacctgacaaggttcacggggtcccgttgcgcaggacccaaacgtcaacaccacttacttaaggcagaccttacagcaacataacctcgagaggggattcggcctcgctagagcggattgcgagtatagggcaccgctacctccccgcttagcacggcaaagttaaaaccaatattcggttgccttcattaaaggcattatcagtataacttgtttctttataaaatgcaaatacgttagttcccagtattcttctctaatttttttattgcttttctttttttacgaagctctctaaaaaagcttgttaacaacgtaccgcattcttcctctaatacaccagatactacttcacattgatgattgaagcgttcatccgttaaaagattcatcaatgtccctgcacatccgcccttcggatcacttgcaccatatacaactcgcttcactcgtgataaaacaattccacctgcacacattggacaaggttctaatgttacatacagtgttgcatcttctaaacgccatgtccctaattttttacacgcctcatctatcgctagcaactcagcatgagctattgatctctgctcagtttcccttaaattatgggcaacactaattacctcaccatctaacactataactgctccaattggtacttcctgtatttcctctgcctttttagcttcttctatcgctaattgcataaaataaatatcttgatcttgttccataacatagtcctttcattacaaataaagtacacttatttccatttactacacaggggataacttttacaaattcaatccaccctaaaagaaaaaagagaggggattacatatgaaaaataccgccttgctcattatcgatatgattaatgactttcaattttcccacggacccattctagctaaaaaatgtgaaattataacaaaccctattttacaattaaagaaaaaaatgaaatccttcggctgtcctataatttacgttaatgaccattatcaactgtggagatctgatatcgaccaacttattactcattgtacaaatgaatatagcgaaaacataatccataagattgctccaagttctgatgattacatttttattaaaccacattattccgctttttatgaaacacctttaaattcattactaggttatttaaaaatagaaaatctaatattaacaggggttgccggaaatatatgtatcctatttacagctaatgatgctcatatgagaaattatacattgtatgtaccagaggattgtatcgcctctaacaacgaccaagataatatacatgctttaaaaataatggaaactacattgaaagcaactataacatcatcaaccaaaataaaatttaattaatacatatatctattttctaactttttatatcaaattaacccgctcgcttccctcttgtgctacaataattctgttttgtgtttttagtagtcacggtaaatcactgattgaaaggaggaaacagcgtgaccggagtaccatttatcacggttgaaggaccaattggtgttggaaaaacttcacttgcgaaggaaatttcaactcacatgcaactccacttactaaaagagattgttgatgaaaatccctttttaggaaagttctatgaagacatcgacgaatggagttttcaaacagagatgttctttctttgtaatagatacaaacaattagaagacattaacataaagtatttgaatcaaaggaaaccagtagtagcggattaccatatctttaaaaatttaatttttgcatcccgcacattaaaagactcccaatatgacaaatacatgcaaatttatcgtatccttacacaagatatgcctgtgccaaatgtcattgtttatttaacagctagcctagaaacattgcaaaaacgaatcgccatgcgcggaagagaatttgaaaaaaacatggatccaaattacttactacagctcacaaaagattatgaaacagcaatggatgcttttaaaaaagatcatccggaaataccagtattgaaatttaatggagacgatatggattttgtaaaaaatcctgatgatttaaacgtcatcctatctgcccttcaaaatactctcttaaaggagtcgaaataataatgaatttaaggcaaaaatatgatatacccaatgacgcagtaatcactatcgccggaacggtaggtgtgggtaaatcaactatgacaactgcattagctaatgctttaggttatcgcacatcatttgaaaaagtagattccaatccatatttggacaagttctatgcggacttcactcgttggagcttccacctacaagtgtactttttagcagaacgatttaaggaacaaaaaagaatttttgaatatggtggcagttttgttcaagatcgttccatttacgaagacactggaattttcgcaaagatgcatcatgaaaaaggaacaatgacggaaactgattatgaaacatacaaaggtttatttgacgctatggtcatgactccttacttccgtcatccagacttattaatttacttagaaggttctttcgatgatattgtcgatcgtattcaagaacgcgggcgcccaatggaacagcaaacaccaattgagtactggaaagaaatgcatggacgttatgaaaactggattaacaactttaattcatgccctgtattacgcttaaatattaatgagtacgatattttaaaagatggtgattcaatcgaaccaatcattaaaaaaattggccattttttaaaacaaacacgtaaacttgtaaaataaaaaacccgtgcatatgcacgggttttcctattaaattacttcttctttgttggagcaataatttcactctcaggttttcctgcgttaatgcgctgacgaaccgtacttgtactaatatcgtatgcttcagcaatctctttaacagtcatttctttcccgttaattactgccgttaatactttacctgtacgttttggagccgccgctttctttacagctgcttttttaacttgttttggcgcctctactttactcgtagcttgttttacatcacaagtacaaccacaaagtttacggaatgtatcatcactaataatgcgtgatacgtttgcaccactgtttaaaattctattgttcttacagacaggacattgtacataatataaagtttttccatctaaaggaaacgtttgtataataagatccatgttgactcctttcatatctatgaagataatcatcggaatatgagtgtgtaataaggacaaaattaccttacaccatactttatgattggttttaaaataaaaactcgttacgtgttggtaacgagttctccaatctccacttatatgcgctgttgtcaattatatctggaggaggtagagggattcgaacccccgcgcgactctcgccgcctgtcggttttcaagaccgatcccttcagccagacttgggtatacctccatattgacatcaaatataatatcaaaagaaaaacagttagtcaaccctactaaaataaattatgaggaaaggaaaattttacttttcccttcctacattacagtactgacaacgctcataattaccaatcactcataccgatgaatgtttaaatttacttaataactgtttttcctcccatataagggcgaagaacttctggaattataattgtaccatcttcttgttggtagttctctaaaatagctgcaaccgtacgtccgatcgcaagaccagatccatttaatgtatgaacatgttctggttttccatttggctcacggcggaaacggatatttgcacgtctcgcttggaaagcttcaaaattactacaagaagaaatttcacgatatgtgccatagcttggaatccatacttcaatatcgtatttcttcgctgctgtaaatcctaaatcgcctgtgcacatgctcataacgcgatatggcaactctaataattgtaacacgcgttctgcatcatttgttaatttttctaattcttcataagaatcttctggttttacgaacttcacaagctctactttattgaactgatgctggcgaattaaaccacgtgtatcacgaccagctgaacctgcttcagaacggaagcaagagctaaatgcagcatatcttataggcaattgctctttatttaaaatctcatcacgatgcatattcgttacaggtacttcagctgttggaattaagaagtaatcttcactttcaatacggaatgcatcttcttcaaactttggaagttgtcctgttcccgtcatacttgcacggtttaccatatatggaggtaatacttcttcatatccatgctcatcagtatgaagatcaagcataaagctaattaaagcacgctctaatcttgcaccagcacctttgtaaaatacgaagcggcttcctgttactttcccagcgcgttcaaaatctaaaattcctaaatcagtagcaagatcccaatgtggttttggctcaaaagtaaattctttcacttctccccaagtacgtgctactacattatcatcctctgtttcaccaactggagcagattcatgagggatatttggaatagataacattaatctttctaagtcttcttcaactgtacgaagttcgttatcaagatcctttactttttctccaacctcacgcatttctaaaattagagcctctgcatctttcttttcgcgctttaatacagaaatttgttgagatacttcgttacgtttactttttaattcttctgtctgaacaagtagttctcttcttctcgtatcaagttcttcaaaacggccgaaatcagttaaatcttcgcctctatgctgtaatttcgcttttacttcttcaaagtttgtacgtaaaaatttaatatcaagcattatatactcctccttttattttataaaacacaaaaaactcccgtccctatataaagggacgggagttaacccgcgttgccaccctagttgaaagcattaccgctttcctctcaagtagaaataacggctcttcaccgggaatgcttactaatccaaaagatattccacattccattccaggatggattcacaaactgtttctatcgatttccaccaaccatcgactctctataagaaacgacatttgttactatttcctatcaacacgcttattttataaaattgttaccatcaatttactataatcttatacaagttgcaagttacttatacaacttttttcattttcgcttcttttaccatttcaacaaagtatgctgtcacacgatgatcatctgttaattccggatggaatgaagcagctaaaaactgatcttgtcttaccgctaccattcggtcaccatgcttagaaagcacttcaacattatcagctacttctacaacatacggcgcacggataaatacaccaatgaagtcttcacccacgccttcaattgaaagcgcagcttcaaaactatccttttggcgtccgaacgcattgcgctcaactgtaatatccatagcaccaatatgtgctttttcatagccaataagtgttttcgcaagaagaatcatccctgcacatgtaccaaacattggtttaccagactttgcaaatgtacgaagtggttccatgaaagcatacttatcaataagacggcgcattgttgtactttcaccgcctggtaaaataagaccatcaatctcttcaagttgctctatacgctttacaacaacagcttctgcaccacttgcttcaactgattttacatgctcacgaactgcaccttgaagacctagtacaccgattttcaccattttaaagttctcctttaattaccatccacgctcttgcatgcgttgttctggtaataacgttgaaatttcgacacccttcattgcattacctaatcctttagaaaggcttgcaattagttcgtaatcttcataatgagtcgttgcttcaacgattgcacgtgcaaatttctctgggttttctgatttgaagataccagatccaacaaataccccatcagcaccaagttgcatcattaatgctgcatctgctggtgttgctacaccacctgccgcaaagtttacaactggtaagcgaccaagacgtttaatttcaagtaatacttcgtaaggagcgccagtattttttgcatatgtcattaactcatcttcacgtagactcgcaacttgacggatttctgcattgacttggcgcatatgacgcactgcctctacaatgtttcctgttcctggttcaccttttgtacgaagcatagatgcaccttctgcaatacgacgtgcagcttctccgatatcacggcaaccacatacaaatggaactgtgtaatcacgtttatttaaatggtatacttcatcagcaggagttaatacttcactctcatcgatatagtctacccctaatgattctaatacacgtgcttctacaaggtgaccgatacggcattttgccataaccggaattgacaccgcacccataacttcttcaacaattgttgggtctgccatacgagaaacgccacctgctgcacgaatatctgctggtacacgctctaatgccataacggcaactgcgcctgcctcttctgcaatttttgcttgttcagcgttaactacgtccataataacgccgcctttttgcatttctgccattccacgttttacacgttctgtccctgttacatttgtcatgtacaaaaacccccctaggtgaattgctttcccccgttaaaggcgaaaattaagaatactcttacattctaccactaactatcagatgcttgtctactactttttcataaagtcggtatgaaaaataggaataaaaaaaagctcctatcatgaggagcttttaaaaccaaccttttactgtatcaacagcactattccacatgccactaaagaatgaaccaattccgcgcatagcacgagtaaaccagtttgcttcttctacttcagatgttgttacaagatccacttgcagtgacttaccagttaaaaatccagggtcgtttgtatcttttggcgtaattaccatttgaccaagcgcagctccctttttaataggtgcttcttgtcccttgcttgattcttttaattccgttttataaacatctttacttccttttggcactggaagtgaaatagcttgtttcgtttgaactgctacatctttatctttcgcattttctactcgtactgtttcttgtccttttactgaagaaccttttttatacatttgttttacttcaaagttagcaaatccataatcatatagcttctttgtttcatcaaaacgtgctgtatgagaacttgttttaataactacagaaataaaacgcattccgtttctttcaaccgtaccagtgaagcaatctcctgcctctggagttgagcctgtttttaggccgtctacgccatcatattctttaactaagccctttaacatccagttccagttcgacattgcaaacttctctttttctggacggaattcttttttagggatttttgctgtatctaacacttttggataatctttaattaaatgttgtgctaaagttgcaacatcctttgcagacattttattttcttcatccgctgttgttccttcaggatgcattccctttaaatctttattcgttaaacctgtagaattgacaaatttataatttttcaaccctagttctttcgatttatcattcatcatttttacgaagtctacttctttacctgcaattgcttctgctaatgcaattgttgcaccatttgcagaaaagattgccattgcctcgtataactcttttactgtataagagccaccattttctaatgcaacatttgataatgaagcatcttgtgaaaccttatatgcatattcagaaaccttaattttctggtcccacttaagttttcctttatccactgcttcgtgaactaaatattcactcatcatctttgtcatactagcaatggataataattcatctgcattcttttgatataaaattttcccagaattcgcttctactaaaattgccgcacctgcttcaatgtttaaagcggctcctgtttcagctgatgcattgctatatggcataaaaatgctacaagctagtgtaagcactgttaccaaagcaatgaatcttttgcaaaacatacctttcacttttgctacccccaatatctatgtactcacataaccgttattctaacataatcaaaaaaaaatagacagagatatcaaatctctgtctatttgtatataagacattataatgagtagtttggagcctcttttgtaatttgtacgtgatgaggatgactttcacgtaagccagcacctgacatacgaatgaattgtgcattttcgcgtaagaattctaaatcctgtgctccgcaatatcccatacctgcacgtaagccaccaactaattggtgaactgtatctgctaaaggtcctttatatggtactcgtccttcaataccttctgggacaagttttttattgccttcttggaagtaacgatctttacttcctttttccatcgcaccgacagaacccataccacgatacactttaaattgacgaccttggtaaatttcagtttctccagggctttctgcaacacctgcaaacatgctacctagcataacaacatgtgctcctgccgctaaagctttcaccatatcaccagagtacttaataccgccatcagcaataactggaatgccgtgtttacgagcttctgttgcacaatcataaaccgcagttaattgtggtacaccaacaccggctacaacgcgtgttgtacaaatagaacctggtccaataccaactttaactacgtttgcaccagcttcaattagtgctttcgttgcttcagcagtagcaacatttccagcgataatatttagtgatggatatttagcacgaacttcttttaccttatcaataacacctttagaatgcccatgtgctgtatcaagtacaattgcatctacactagcttttactaatgcatcgatgcgaagcatagcatccgctgttacaccaactgctgctccaactaataagcgtccttgcttatctttagcagagtttgggaattcaattactttttcaatatcttttattgtaataagcccttgtaatacaccgttattatcaacaagagggagtttttcaattttatacttttgtaggatcttttcagcttcttccagtgtagtaccaactggagctgtaattaattgttcttttgtcattacgtcagaaattttgattgagtagtcttggatgaagcgcatatcacggtttgtaataataccaactaattttcgctcatctaaattatttacaaccggtacacctgagatacgatattttcccataagatgttctgcatcatatacttgatgttctggagttaagaagaaaggatctgaaataacgccgctttcagagcgctttactttatcaacttgctctgcttgttgctcaatagacatattcttatgaataattcctaaaccaccctggcgagccattgcaatagccatgtcagcttctgttactgtatccattcctgcactaattaacgggatatttagctgtaagctttcagataaaactgttttaacacttacttctcttggtaatatatctgacctagctggtacaagtaatacatcatcaaaagtcaaaccttctttaacaaatttagattcccacataattgttccccctatgataccagaaattattattagtagcttatcaattggttaaaatactgtcaaggacgtatatatatgttagaatttttagacaataaaaggagcgtaatatatgcatcaaacatcttgtacttggcagcagttaagtttctttttttcatctcaaaacgtacaacgttatcttgcccgttgttacgaaaaatcctctattcaggatgccgaaaaaaaaagttttgaaaattgttatccctttatttattacttagaacacgggaaaaattattatgaattatataagacagctccattttccattcaaccaatgttgttattttatggaattagtcaactttttaaagcatgcctactaactattgaccctaactatcctgaatccactactgttttagctcatggcgttacaactcgcaaacgaaaaaaacaagggtatcaatttttagaagatgaggtgaaggtacaaaaaaacggattatttactcatgttgcagaacaactgtttcacatgaaacacttagaagcagaaaaatttaacatgttagaattaatgggaaatattccagaattacaaaatttatttcgttatagtcaaaaaggatcaactttatataaaatcgattcaacaattaaaaatgagctctccttttcagtcaacctactagatcgattacatatgactaaagagagattttctcgttacattgaaacatcttgtaagcatttatcaatacagcacgtacctgagaagactaatgaatcgaatttactttttacggcgcccgttcaatcatggaatcctatgtacagtactcctttatactatgaacatcttactaatacttattatttgccacttacgactgatcctagaaatcctaagccaatattacctgaactcctcattcattatttattgctctataatttaagcatgatttctaggtatgaaacagattggtggtatgacttacttggcagttatggttctgaagattatccatttatttatcaatttctaagtatttctgctcaaaaaatcccttactatatttcaaattttttattaatggaaccaaatctatttcatgggaaataaaaaaacacaagtcaaatgacttgtgtttttagttgcttggcgacgtcctactctcacagggacaaggtcccaactaccatcggcgctagagagcttaacttccgtgttcggtatgggaacgggtgtgacctctctgccatcattttttaactctgattttcttagcgtggtttttttccgaaatgctggcggtacccctagaagaaagtacaaactctggaatacacatttttataaaagattttcttagacatgatcctgagaataaagagttactaaaaatcctcaatactggacggagtaaaaaaattagtgtaactattatggaatattcttataaagaatgtattgaagtggttaagaattgtttttcaaaaatattcgtatttggaattatggatataggcgatgcagagtactttagtaaagcatctaataacctcgttacatccgtagaaatgatgtatatgcctgataataaagcgttagttttattatcaaataaacctccaaagattgttgaaaaagcaatggcttataaaatgtaaagagtataagattttttattattaacatacaagtaaaagagagatagcaaatgctatcttttttttatgtgagtcactatataataggtaaatcagctaaataatttaatttataaaaactgaaaattatgtatattttttagaaatatttataataaacttacttaattttgtttttgttactatgtagtaaagggatgagatgaggagggattttatgtatacagcaaccagtaatgagaaggttatggaattgttaaatacttggtatatagaaatgagagctagacgtataggcaatgcccaacgtctaaaagagaaaatagatattaaaattcaaaaattaaaaaatgaaaaagaagaagcgttacaagatcaaaatttattgttgtattattctttattggatttccgatacaactacttaatagacaatttaggtatatcaaaagatagttttgaaaaaattaattcttttgaagctccaggagataactttctagcatattattataacttctttaaaggcattcactcaaacgaattaggaaattatattgaagcaaaagaacactatgaaaaagctgaaacttttttagaatatgttccagacgaattagagaaagcagaattttattataaattagcaacatatcattatgatatccagcaagctcttttatctattaaatatgcaactaaagctaaagatatgtatattcactattcaggatacgaaataaatgttgccttttgtgacaatattttaggtctatcttgtacatatcttaaagagtgggaacttgctgaagaacattatactgctgctatgagtcaatttcaaaagattggtgaagaaaagtttattataatgatccgacacaacttaggctggatgtatgcgactcaaaacctatcagtcttagctattcgttacctatctgaagttgtcgaaaagtcccctaaacattataaagcaatatatgttaaggcaaaggagcactttaaattaaatcaaacagagttagcaagtgtattaatagaaaaaggcctagaaatttgtaatgatttacaccaggaagaatataaaaatcgtaatttaattttaagagaaatgaacaataattcacctgctgaacaattcgaacgggtagcattggaagggattaaatattttgaaagagaagaactatattataatgtccaggaatattatgaagcgctagcaaccaaattttatgaagaagacggacattctaaagcgagtaagtattttcatttgggtttacaggctagaaagaaagcatttgataaggaggcattaaaatgaagaaaacattaattggtttaatgggaatcgttacgattttaacttttacaataggtctatctaatccaggagaggttcaaaagtttattcagactaaggttgctgcatccgaaggcgactatggaggataataatttttcagagagaaaggaaatgactttattgctacttaattagggctcatggcacgggatgtacggcagctgcctacattccgtaagccaccgctccacctttactcaactcgataactacagattgtagaaaaaagattagctggcagctgcagctaatcttttttacaatctgtacgttcctgagtttcgcttaacaaggtggacggagcgtaaaacccgaaaaacaaaacctaaaccccttaaaggaagccaggctagtgcctggcaaaaaaagtacctggtatagcaagcccattcccacctgactttgaacgtgtgggacccccgaacccttcacgctcaaaatctaggtggggagctcatctgtcaagggcaagacaagaagcggaatagcccaactcttactgcttttgagtttcgtatgacctactcgtcatgcttcctcgtatcccaactcaactaacaaaagactagtaatcgtatagcctctcccacttcccttgacagacgagctctgggcttgctgttaagcttcgcaccccgtcgggaaaaataattcccaacgggaaggataataccaggtatttttttaaaagaaaaaacaaataccccattgggctatttgcccaataacaaacaaacgttagcctattggatcgttaataggattaaacaatagtagatacagcttgtttatagataagttgttgttttccattaacgatcataaggatagtaaatttgtctacacctacaattcgtcctgtcatacgcacaccactaattaaaaacagtgtaatttctttttttgctaattttaattgctcatataattcattttgaatatctttcatttcagtattatatcccccattctagtaatatttacaatataaataaaattctatcgtttaattcttactatggccactaagaattaaaacatgaaatattaaactgaatcatttttgtgttattatttatcgtttttatataaaaacgataaataatactgtattttttgaggggtaatatgctataattatatatgtaagggaaagagaaaaattgaaaggattgaataactatgaatgaattatcaattgttaaagaaacaaatcttattattttagaatcaccaaaaagatatgtgaaagcatttgaggaagaagctacaactaaagtggattcaaataatatggatcttacaaaaaaccagtataaatgttttttaaatgctgttacaagtttaacatttttattaggtgaagcactgacacaagaacaaaaggataaaattattaaaacaaggcagggcataattaatatagcaggggaattaggttataaccgccatgagatagttagatcatcattattttatagtgaaaataaagcactttttaaaagtgtattatagtttacctctaacatataccaaaccgatataacggaagacagaaatgaatatattcgttgttgcaatttcatacaatcttagtgttagtcaaaaaggaaggaaagtatatgcggaagtatttactacatttaaagaagcttttgattatgctaaagatgaaatctttgatttacaagataaagggatcgaggttgattatagagaggttataaatgatgagttaaaagaaagagaacataatttatcatttttagtacaagaactaaatggaacagattttatacaagttacgattagacctaaaaagatatagataaatatagagataaaaaataacaaacaaaataacaaatcattaagaaaaaaagaggccatatatatgaaccaaataaacgtagcatttaaacgtagagctgttacagcaacagtagaaattcgccataatgatttttatgtagaattcgaacatttagcgggatatctgtacatttgtaaatttgaaagagaaatagtatatgtgaaaaataaacaaaatggtggagtagttaattcatattcaaagtcaaatgaagtgaaaatatataagggatacattaagtattcagctgataatccatttggagcgattcccactattgaagaaatattgaagaaatgtgacctgggtacaataagaatagcaagaaattatgtagaggcttattatgtgggccataatgaacagttagaacatttatatccaattataaaaaacgatttatctgtatataagggtgtttttgttgatgggttatcagttagagaagtgatagaacaaacagattttgatatgttaaaggattttaagatgtttaaagtagaacgtgtttgggatgcaatagaacctcatttaatgaaaattgaagatatgttctttacagaaatatacacattctttaaagggaatttttttaaagtgaattatagagatatttgtacgaagttcttttcataatagaatccctccttctttaagaagggggataaaaggagaaaataagatgaaaaagtttatatatattacaagtattttaataggcggcttattaggtagctatatatcactaacttatgcaaaggatgcaactttatttgaaaaagcaggaatgtatttccttatttttcctaccattataaatagttgtacaaaattattccataaagcaattactggaaaaggagaaaaaaatgaaacattatttgttcctacggtacattgtgccatttgttggacaacactattgttctatatcaatataaaattgaatttccattttgttttaacattagttctaatagtaaatataatcgtttgggtaattctaacaattacagtatggaagcgtaagcaagaaaagttaattgcaataaaataaaagaaaatcaaaaatctttgactttaagatataccaaatagatataataagaagttgtaatttaaaaaatggaggactttttatgagaaaagtaaaagttatagtaaatacactagaaggagaagctgggagaattgcttttaaagatgttgggtgcgccaatacttttattatggtaatgaacaaagaagctttaaaaaccaatcaattaaatttcaaaattgaagttaaattggttttacaagaagaagattcacaaaaaattcttgaattattttataaagttaatgaaaataatgatgattcgccgattcaggatgaactaataagaagctatatacaaatcaagaatgaaatgcaagaagaaaaggattcacaaaaaattaaggaactagaagaactacttaaaaagtataagtctattataagagagctaatccctaatattttataaataataatttgaatatcattatataaatctaaaaagctcttataatatacaaattttaaaatgtcaacatattagaaacctgttagaatggccaactggagaacaaattatatctttgagatccagttggttgcaacaggaaataaaaatactaaatactatgaaaggtgtaatgaatatgggggattttttaattggtttgtttagtcttatagttatattaatcttattactcttattttacataggaatacgttacacaaagatagtgggaattgtatttggagcttttccacttacattgtttttcttatttttattatataaatttttagaaactacaggtcagcttgttaatgaaatatataataatgcaggtgttaaaggaattataataggagtctttggtttttgttttatactaggcatagttggattgatagttaatgctaatgaaaaacaaatacgtaaagaagaattttgattataaatttatttatatggattaagggttatataaatataaaaaagggtgtgttttgatggataagatacatgaagtagaaatgttggaaaagaagaggaaatcaagccttagacaaacgatccttactatagcattagtacttatattgggaatagttatagaatatttttctttttttgctgatttatttgggcttatgggaatagaagtttttttaaaattccttttacaaattatatttttggggttaggaatgattagtgtttgtaactttcttatacttcttacaataattcatcaacttgataaaaaaagggacgatattaaatcaagtaaaactttattataaataataatttatacgccaggaaagaagcggctcaataggagccgcttctttttatttgaaaggttggcatcgagccaatttaaaaatgaaaaacacggatgcaccgtgtttttatcaaagtagcaagctaaagcttgctaaataaagcagatagtcaaaggaaatttgttgagtaactaagtggattgaaaataagggcccaaacatgggtttagagattaattatatcttttctgtactttttatttaaatggattccgaaatgtgataaagggagagataggagccttaaattgcgtttttaaactaattgttagagtggaacaaaaattaatgggctactcgcccaaacccagccaacggtagcccgttggatagctgtttattatccccccagcccccgttacatcgggggagctaccctcgccggtaggcaggccaaaacgaaaggttttggcaatgccaagagggtattggtgtagtgaaattgtcaactccttatcctccctcccgtcgctttgctatggtcagtccggtaccgttgacaatgctctagtgtacatgtcttatctttgtatagcttgtcaccatgtttattaaacatatccttaaagaattttcaaataagatatatcaagtcaactagtttataagctagtttgttttgaaatggtggaatatgttcgagaacgtgttctaccatttttaatagctgttctttagaagaacgtaagttgttcgctactcaaatgctagtggtttcttttaacttgaaaatagttatatgcttttgtattatttattgtttattcataaaaacgataaataatacatatattttattgaataacatataccaatgtgatataattatatgtgtaaggaagagaatttaaaggttctaaagtcaattgaaatataaaaatcagtatatcattataatgggatggtgaatttaagtgaagtatccaatatgtccgtattgtgcaagtgaacaaaaaataagaaatggagttctactaccaaaatgtgatttttgtggtgcggatcttagagataaaaatacaggttgtcttcgcctagtaagtgataagggagaaaggtttaactttcaaaaaatgaaaactaatattttcgaagagcatgcgatgcaatcagtagaaatattaaaaacatatcatagttttgatttatacattttattaaaagagataagagaaaaaagagaacttttatatatggggtatgagatatttttaaaagcagcaaagcaggacattgaatttgaaaaaaatgctgaaaaagagttacttgtttttaatgactggactaggcgaatgtatgtaattgaaaatattttaatagaaagacaaggttattttccttctaatataactgataaagtccttcaatacatgtgggatcaaatgaaacattctaaacaaaataagatgattgtacataaaaataattgtaatgaacctaatcatataaatactgattgtgtttagaaataaataaaaaacattattttaatatataagaatcaaaaaatgttaaaacgataaataaataataaaggagaaattctaatgacagtgcttcaaaatcaaatgaaacaaaaattaataactgaggaaaatatagatatgctaaaaattttagcgcatccggtaagactacaaatagtcgatgttttaatgcgacataaaaaatgtaatgtaacacaattagtggagttattacatatcccgcaatcaacggtatcacaacatctatcaaaaatgaggggaaaggtgttaggatctgatagaaaaggactggaagtttactattttgttactaatgtaactgcacaaaatatagttcgaactttatgtgaaaaaaaggagcatgggggaaaatgaattgtagatattgcaatacatatatagatattaatttatgtggtacatgttctttttgtaagcacaattttatagaatgtacaataggtcctaaaaaaataaaaagatatgtagatgaaaatgatgctgtacagcctatagaggtattaagaaagtatcatacatacgatctaatagtatgtttaaaaattatgcgaaaaaagaaatcagattcatattcatcgttagttcaagctaatcatgatacggatagtacaaaacatgtaattaaagaaaaaaaggaattatatagattttggaaaaagagaacttggataattgaaaatttacttatagaaatacaaggctattttcctgaaagaattactgataaatatttaaatgaactatatagccaatgttttaagtcaagtcagaaaagaagtagggaattgttgtctagatgtgtatccttgtagtttcagtaattatagaaggtgaatataatgaataaattaacatataaagcaattttaaagaaatataatcctgaaacaaacaaagcaggtcgagaggttcgttcaattacatttttcgccaaagatattaaagaagcatggaataaagcttctgatgaatttgaaaaagaaagagaaagtaatgatactattgaggttaagttgatatagtattgtcttcagtttgttattatgctactatgattgatggtttaagctttttttcttatagtttgttattttatcctggattaaaacatccaggaattttttttaacatttaactggatagatttggcaaaaagaggtggtatcaaatgaaaacacaaatgtcatttaatatttatattgatcaaataaatgattttacggaaattgttcctgagactttacgggcacatacaatctgtaagtttttaaaaaaggagtatattccttctaaaatagttaacgcatttgaaggtgaaggtgaagcttatcaaataagaatggataaacgcagtattaataaattagatgaaatggtcaaaatagcaaatgaaagcggattaaacgctaaaaaagacgtgaatcgatcagctattatgagagatgtgtttgaacaattcatcaataaatatagacatataaaatttccaaagccagaacgaaaaaggacgttgctgcacgttgaagctggcacaataaataatttagctaaatatatagatagttatgaaagaaataaaactatagaagagtttattgtacaggaatacagtggcccacatataacagctaaagaattaaagaaacgattacgtactgaatcagaattaattcctattaccttggatgcaacaacctttttaatcttggatgaaattgcagaggaatttggggaaaatgttaaacgtgcacacattttaagagatgcaataaaccaattatcacaaggatttaatgcatctctaaatatgtaagtgtaggtcaaataaatgttctatataaaataatatccaggtttattacatctgaataagcgataaccaattaaaaattttagaggggggggattaattcccctaatccacttaatctattttaatccaacctttttttaatgcttttaaaacggcattaagtctatcttttacttctaatttttttagtatacttgaaacatgattttttattgttttatcacttagttcaaatgtttccgttaattgttgattagaataccctttacctagtccttctaaaatgtcccactctttattagttagtaaaccatcaggtcttccagtgttatgctcgtaaatttttaagcgatctaaattatcttttgtattatctaacttcgaagaagtaaaatcagtgtggaagaaggcaactcctggatcttcaatagtttctagtacacacattaatttattaatctcaatatttttaagcaaataaacgtctatatcatattcatccattgcactaaatacatcttcttgtaggcttttgtttgataatgcaattatttttaatgagtaattatcctttaaactagatagtaaaaagtttcttccttcaatcgtttcgtagtctataagtaatatatgtgatacattatctagtcctttttctagtaaagtagattctaattcattataagtagatacatcctggatttttcgatctaacttggcttctaatatttgttttagcccagccctgtatattggttgatcactccaaatgataatattactgttataaggaatgtttgtaggttccatatccttatatccctccttttatgcttttaaataacaatagaaaagttattagacccatataaatattaacacgttttgagtggaatttaattttttgaatattgaaaaagaataaaactgaattagtactatattctattcgtacaactataatcctataatagtaataagataaaaaatactgagattttgtggaaaatgcaagaataaagagttttgaaaggatataagtaggtatatgggggtattttgatgaaaaacaactaaatttggagggatagtcgatttatttaataggtaaaaataactatataaaaagatgttatggtagttaaaaagttctattttaggtataatggtgaagtatacgtattgtaatttagatgatattttagtattattagtatcgaagataaatattctaccaatttatttcccgaattggttgtttatatttaaaataaagataataaatacatatataaataaaaaaatataaaaaaagacaaataaaaaaggatgatgtttcccgcatcatccatcatagtagtgagcaaccccgctaaaagtcgagcactacaattcgcatatttacatcatcataatatcatgttttattttgtgtgtaaagtatatttaaaatatgattctataattttttgcgaataaagtgtattctaaatattagatattcgaaggctatcgagtgttgtttactgctgtaaaaaaagcagagaacaacacttttttgttgttccaaaaggagtagaaatttaatggaacaagttaaacatattttagagcctataacagagtacacatcgcttgatgtaatgcgttttatggttcatggtgcattatatgaaaaatcacctaaaaattggacaatggatgatagaaagagagaaatgcaacgtgaaagattaagagaggttggagttgttcatgtaactactggaaaagagcaactttctacgggacaaagtattgtggtaagtagctttgagacattagaacgcttaaacaatcatttgacacactggacaccacaagtctatatgtggggaaaggctaataatgaagggcgtaattttgaaaacattcgtttcattacatgtgttggagtagaaatagataaaaaaattagtcttgaagaaattcattatgcagcagcagtaaataacttgccatccccaagtgttattctttcaacaccacgaggattgcaatggttttatgtattctctacaccatttttgacagaaaaaggccgtaaggcaggtcgttttgtttctgaagaaattaaaagagcctttgtaaatgtcatggatgctagtgaagtagaagaaggaactacaaagcctatatttgaattagaagcggatcttggggcttattcgctagggtattttagaattccacgagaagataatgtcctttactttaatggacaagcattgaactcagaatgggctttagcatgggctaaagaacaatctaggaagcataaaagaccagcggttgctaatacttcttcaagtagaatgtataaaaaggttggcatcatggaagatccagcaattcaaagtattatcaataacgtatttttacgtggctgtaaaggcaagctaggccgtaataatgctgtatttattttatctttagctatgaaatatgaaggtaaaacagaaagtgaaatcattgacaaaatagatgaatggaattctcaaataaaatcaccattaaagcatactgagattttacgtactgttagaagtgccatgaatgataaatataatgcgcctaaaaaggattatgtagaagaactggctgaaatgagaatggaatttgtctttgatatccgtacaccagcaaaggaacgcttagaccgtcagcaaagccattattcagaatgggagcaagatattatagagatggtagagcagcaatgcacgtctgatgcaccttatttatgcggctctctacgtgctttagcgcaaaaaattggtgaagagtcaccagtaggtaaagcaatgaataaatctagcttatccgatgtattaaaggtttctaaaaaattaattgtaaagactaatggaaaaaagggcagaaatgctcgtacatatattacaacaagaagtgtattactgaaatccaataaacataactttaaagcctttttattagggaaattagcattcaatgaagagatcgagagcactacacttgaagtacaatttcgaggccaaacaagcgaacctgaagcaaataaaaatagtagaaataaacgctctgggccagggggataattcaaaaaaataaatggccgaacccgtacatatatacctatcggtataagtttggtttagagtttcctgttagtggagattatggagttctatttatggttcttgttttaatatttgcatacggtatgtgaaattttgttgagagtactctttatttaggagtctttattatgtgtttctttttcgtggattgtgttagctattttaatcacggttgttactttagatctaagagaatgtgaattgttggggattaggtagtttcatatatttgatgggcatgtatggtgtcgtctaagaagaaataagaacgaatgggaatgaaaagttgtttatagcccatcctcaagggttataacatccatattcttctatcttttttatatggtataattttcatagattagcaaactatgaaaagaagggatgaatttggttcaaataaaagttacaccagaacgtctagagcaatcagcaaagatggtcattgattctaggactttactagaacagatacataaagacctgtatcagcaaacagaatacatagcttcacaatggagcggagcaactagtaatagattctatgcaatgtttaacgatgcaaagccattgatgttcaatatccttcaagagctagacaaaattgcaaaagagttatatcattctgccgaaaagtttcgtgaagctgatacattatatggagagaatttggttagtggagatattgaagaaggtgcaatgtgtggaaaaccaaaatctgatttagagaaggcttgggatggtctttatgatggggcaggaaaaggtgtcggtgatgcatgggaaggctttaaggcattgggagacggtgaaacatggtcaaatatgtgggatgcagttgttaattatgatgaaacgctacctgctatgtggaatgctttctctgattcttttatgaatgatgtttggtacggagatgttgaaagcggttttcattggggttcttatcttgtaacatcggttggtttaggacttcttggaggcaagggactggataaagcttcaacacttgctagaggggctaggttctctaaaataacccagattaccccaccacgtttacaacctgcctttgcaggtgtcggtttaactggtgaagctatgctcagtgcgttaccgccatcgggacactgggggaattatttgagtagctatctcatgtttgctaggccacattggcgagaatccgaaaaacatgcatatgagaaatatcctaattacaaagaccaagtatcatttaaagatagagaagaagtaccgtatgcaagtaaaggcagtactagaccagacggttttgaccatgacctaaatagtagtttggaggttaaaaattataaccttactaccgaaagagggaaacgttcgttaattaatgttttactaaaacaatttgaatatagattaaaaaatttaccagaaggtgcagagcagatagcttttattgatgcaagaggtcaaaatgtatcacttcaaactttaaaggaaattaaagaggaactatcacaaagaacatttggtaaattgaaggtaactatcgaaagagattagatagaagggagatgtatttatggcaacaggatttaaagcagactttctatggtatagattaggtacatctgattttgtacactcatttttctcaaccattagttttcatttagaaaaagagggttggggaacaaaatacccacacttgatgaaagagctatataacggaaggttaacacttcaaaatatcccaaaggcaatcgaggaagcaaaggaagctcgtgaaagattgaaattattttcaccatcagaggtagtatgggatatcgaagacttatccaagcaaccaccatggggagataatatttcaacagatattacagacttatctaactatttttacacaagtggcggtaaggacatgtttgaaatgttatttaaagcatgcaacgaagctttagaattagaagtagatttagaaatagagaatttataaagacatgaaatttcatcatgtctttttgttttgttcccatattcaaaaacatcctaaatgggtgtttttgcccatccccccgaaaagggggaataaggacaacaatactttattcttcttgatgttgcctaacttttttcaaaatgtcctttacaaagggtacagattacaaagggtctgcttttttatttgtttcctattacacaaaggcatcctctttcttcataacatttcacatttgtaaatcctgtcttataaaataggtttattaattcttcattcgttttccatttctccatatgatattgaattttaaaagtttcagcgaccaataaaaaggatccgtttggttgtaggacgcgaaatagttcttttatatcttgttccacatcaggccaaaagtagtgtgtttgaaaagcggttatgagatcgaagaagtttgtatgatagggaatagaagaaacgcttgcttgttgaacaaggactttttgtttttgaacatcctttatattcgtctgtatagaattttttacagcttgatcggagtaatcaatcccatatattttcccaagtggagttcgttttgaaagagtgtgtatcgttttaccgccgccacaaccgatatccaatatgattgcatctttctttatatgtactttttgtaatgcccaattggttagtctcgtatgtgcactgttcataatacaaagcatggaagaaccaattgtcccgcgaggcttttttgcttgctggattaatcgttgtaaaatactcaagttaaattctccttttatgtaagaatatatactcatttcgctttttataaattaaatcctttaaaaaaagcacgccgatagacggcgtacttctaacaatgcaaagccccttttaaccaattccgcgcccgatatgccccgactggaacttgaataagagatgtttcattcccagcatcaataccgtacaattgatcacatgaatttgtatcaaaacttagtaacggatgcccgcccatccccatagcagttgcagcaaaaacgagtttatgaacgaggataccagcttccatttggtgaatgcggtatcctctatagcctaatgcacgtgtatagtaatctttctgtccgactacatgtaagcaaagtggtacttgaaaaaggtttacgttatccatcgtcatactagactgaagtgggtagcgaaggtctccatatcgaattggttgtatggaatgtgttttactgttataagcgtaagctccgttttcaatatttttcacgctataaaaacatccgtataaggagacgcgtgtattttcatttgtatacttaccgtcaaggtcgttgtaataggggaaggaaaggctcgcttcttgtagtaaagtagcgagctcagcttcatcccatttcgttaaaataaaatccgcatcaggagaatatcgttttttacaaagttgtaggaaatcatacgataaccgttctacttttggtagctgtacagcgtacggattatgttgatagtgctcttcatgatgtagtgtttggaagtgtgctgttgattcgatcatagaagcttcatttatttttgttatcatcggatattcacctacatgttttgagcgaatgaaatgttcatgtgcgagcggcggaatttgttgcaacaactcatgagaagtaactgttttattttcacggtaatcattgtgaaaccaattagtttctggctctgtacttaaaggaataacggcatacacactttcttcaccttctgacaatccgagtaaatggttcagtgcacggtctagaaattgaaagtatacgccgtttgtataaccgaattgctttgcacattctagcaattgtccaatgaggaccccgctatctaatccttgaagacgatatgaaaaattattgtatttaaagaaatttttccaaaacatagtggatacgaatgcagcaccgaaacaatcatctatattacagcgattaccgagtgtgtctgccaaataagaatcgaaatttccttcgcgaagtaaaataagtcggtgatgtgcggcgtcataatggtaaatgccgtctgggtaatcgtcaatctttaaatagatatacaattcattcggatataaagcaccacccgaaggaatagatcttcgtaatacatttctctcgctatttagctgacataattgtgttacaccaaatgaataccaaaggtagtgaccaatctcatctaaagtaggtgtagtagaagagttcggtaaagataatgggatttctaaggagagcgggatggtaggtaaatttcgatataatttataaggaagcggtgcgtctttccagtccacctcatgattcggcataatttcatcgatagagaaatggagatgatgtaaaaaagtatctagctgcatgaaatccctcctttactatggaaacggatgtggatgtggatttaatctttcattcgttaaaggttcgtctgtatatccaagtgtcatcggtacggtatatacccggtccagtcctgtaactcgagtaagatggtgaccaaacgtcatcggtagcatgcctggaataataacttttacacaatgtaatccattcttttctatgaggggaacggtttgatctacaacgattatttcaagattagattgatgcaaacgatttaaaagttggtggagatcggatgttaaatccatatcaaatgattgtgatacattcatttcttggaacgtttgcaccggtgcatcttcccgtaaaaggaagtgaagacgttcttctgtttctttcaatccatacagcatactatggtcttccattttattaacgaaataaggatcttgtaagcatttttcgtagtattctcttttgtgctcgagctcatcgtctgttataagtaacatgcctgctatttcttgaatggcgctttttaaggctcgaataggatctaaatgagcgcctcctgcacaaacaacgttcattccattttcacgcgtattttttgcaattacccataagctaggaatgccgtgttccatcgtcgcgttaaaagcgtgtaattcatatccggtaatcgtacgtaaccgctgaatcattaattgtaattctgtatcatttgctgaattaagatccaggcggggaagaggtaattcggcataccaagtgagtaagaaggcatcacgctctacaatttctaaaatgccgtgaaaaatcgcttcttctaaactaccgccaattgcacatccatttgatgtttcatacacgaaagcatctcgatgaccgaggctataataagcaattgattcaggaactaaaagcggtctgttttgtgataaagaatatccccatacccagttttgctcataatcaggatcaaacggcttgaatggaaagttatcacgattgtaatgttcatttgtatggacaccgagtgtgaggggatttagtgcatgttcctctaaatcatgaaaactaccatgcacatttgtctttttccctcgaggcgacataccgcaatatcgttctaaaccttctaaaatagcagttgcttcactcactgcaaatgaatgagttcgtcccgcaacaccttcatttccgaacattaatggcatgtttataatgacgtcagcgaatggtaatacagaatgctgcatttttccgttcaacataccgacccgataatctaaatagtctctcgttaaaaatgtgtttagctcatgaatggaacggcagcgatacgtttcggtgcttacttttaaactcggttgtaaagaaacttccgccgcatccgcagtatcatcaggtaaattactacatacaggacagagaggatctggaagaaaagaatgccgcgtacattgtaatgtttgtaagtttagtaaaataagttcattttctaaagaagaatggttatgagttaatatttttcctgtttctgcgcaaataagatggcacatttgcaacattccattttgggtggcacgtacgtcacgtctcgttacattatctgctttaaaggcatatttccgctgtagttcccacatttctttttgatcaaagccagcgataaaacggcgtccatcagaacaatgggaacatccaggcgtaagaggatgaatgtaaggaccgataataccttcgccaaatgaagtaaaaccacgaagccatggaatatgatttgagcgaaaaataagttcggcatcatgatgaatagtagaaggagatccgtcatgtaatacgagagcgagatgaatattttcaggaagttcttctgtaagggtctgctgacgaatgatggaatattgtttgcataattgatcatgtacatagtctgcaagaaggccatctcctataagcaatatattttgaatcataaaccgtcctcctttgcaattaataccccatacacaccgtctaggttttcttttaaaaatggttcgattgctaaatcgaacacgaagggataaaaattatgttcttctaaatgctgtaaggcaagctgtaaagattgcacacttggaatttcttcttccgcttgtatttccactctaaaagaatccgtgtcatataaaataatagaggattcaggcaagatattagctctgtaaggaatttcttcattttgaacgtgaaagagtgatagttgtagtgcgtttcgtaacgctaacgtcatattaatattagatgcaccgtaccatctatcatttataccaacccaaacgactggaaaactgagaatctcttcactcattgcgattttaggtgtttcatggattgtagagagagcatcgtaataaaatttacaatgtttatcttgaatatcaattaaatcaacagttgtaagttcctctagaatatgtgactgccgctcatacagtttattgtttaaatgttgttgtagtgcccggtaaaatccttctgtcatcgtttctccagcaccgataccgatattgttatgttcaggaataaggcggtgaatgatttctgctacatatgtttcaattcctgttaaaccagcttctcggcgtgcttcattatgagtcaatccactacgagtcataagaggcagaaggggagctgggccatctgatagtggagtagctacttgaatatagcattgtgataatggtaattgatatgaatcttgttcatcccatacatggaatataccggcttctttagaagttaatgaatcgaaaaagcggaatacatcagttgaagtatgttggccataccgatgctcaagtttttcagaaatattttctatcgtatcaattgtaaaactttcatcagttgcaagagggtgttttataaaaggatgccacgttccttcaagtgtttcatagtttaataaaaagaattgtgattctttttcacgatatgaatcatccgcgacatgtttaaacaattcaaaaacgattacatttgctaacatggcagatgtaattggtgagaaggaatccgatgaattttcattttgtaaagtcgtttcatgtagccgatgccatgcggattcccagcattcatcacgattttctgttacgacaggtccagctataccgagtgttgataaacaaatagctggtatgaaattctttttcgtttctctacaaatagtgtgaactgtttttaaaccgtcaatgtctccgttttgagaaacatataaaatccaatcaaaaggttcgaatacttcacgcaagggacggtcaattgtagtatcgatttcttgaaggagtacactgttatcaacttcatatgcacgttctattagctcatgtattctgtcatagtttgtttcatcccgatctgtaacgaggtaatgaaatgtaggtaaaccagattctaataaagaagaaactaaggaagtgagcatatccccagaaccaagtacaaggacatttgctccgcggtatgtttcaaactttaaagcacctgaatgagaatcagcttctaaaaattcaatttgtgaagcatatctgtcgagtaatgtactgtttaattcatgaggtgcatcttgatttgcatcgcgaacgaaaccattttcatataaaatctctccaatttcaaatacacggttttgataggggagagggaggccatcggttatttcggctaaagaataattcccgttaaacattggcattaatttttcaatccaatcataaattccatcaccgtccatacgaaatgaactggcgttatttcgaaaatagacacccccgtttgaatcggggaggaagaaagtatccttatttactttaagttttgcatgaattggaaggttattcattttaatcctccttacgtttaggcatacattattaccttatgtcatgaaatttgtcccgtatgaacacaataaaaaaaggctgtagaatgattcattctacagcctttaatagatttttaatctatcaaccttctaataataatgactttggatcttcaagcatatctttaacagcaacaaggaagctaactgcttctttaccatcaacaatacggtgatcgtaagataaagcaatgtacatcattgggcggttttccatacgctcgttatcaattgcaactgggcgtacttggattttatgcattcctaaaataccaacttgtgggctatttaggatcggtgttgacattagagaaccgaacacaccaccgtttgtaattgtaaatgtaccaccttgtagttcttttaatgaaagtttgttgtcacgtgcttttttacctaattcacgaatttcactttcaatttcagcgaaatttaattggttggcatcgcgtacaactggaacaactaatccatctggagctgctactgcaataccgatatcatagaattttttaatgataagctcgtcaccttgaatttcagcatttaataatgggaattgttttaatgctgcaacaactgcttttgtgaagaatgacatgaagccaagacgtacatcatgttttttctcgaaagcatctttgcgttctttacgtaattccatgatcgcactcatatcaacttcgttaaaggttgttaacattgcagatgtttgttgaacttctacaagacgttttgcaattgtttgacggcggcgggacattttcacgcgctcaactggtttttcgaattccgtttttgcaactggagcaggagctggactctttggagcagctggtgcttcttttggtgctgcagcatgagcttgtacatcatgtggtctcacgcgtccaagtgggtctgtgctacgtacgtcgtttaagtcgattcctaattcacgagccatttttctagcagctggtgatgcgataggacggtttgtatttggtaacccttgtagtgttgcagtttgctcagcatttggtgccgcagctttcggtgcttcagtcgtttcttgttttggttgctcagccactggtgcaggtgtacttactgcaactggtgctccattagcatctaaaattgcgatagttgcaccaacttcaactgtatccccaggttcgcctagtaacttcgatacaatacctgaatcttctgcaatgatttctacattgactttatcagtttcaagctcaacaacgctgccacctttctcaactttgtcgcctacgttgataagccattgtgaaatagttccttcagtaatagattctgcaagctcaggtactttaatttcgatcattttaaatgtcctccccttatttgcctaacggtgtgttttttcttcttttgtcttcggtaatctccatttgttagcctggccttgggcagaatatctgcccaaggaacaagctagaaagcttcattgttactttttagttgctgtaaacttcaatttcttgtttatcttgacggaagttatacttcacatctaaagcatgtgcaacaattagttcttgctcagctttgtgagcgaatggatcgccgccagatggactagagcgatcaggacgtccaatgtagcctgttttcactttatctccagcaagttcgaacagaattggagccatgtaatgccatgcgcccatattacgaggttcttcttgaacccaaatgatttcttctaagtttttaaagcgtttaataatagattgaactttctcagcagggaatgggtacaattgctcaatacgaacgacatgaacttcgtctaagttgtactcatgtttaccagactcgatttctgctgctaagtcaatcgccattttacctgtgcttaaaacaagacgttttactttatttggtttcatgccaaggttttcttgttctaaagcaggttggaaacgtccttcgcttaactgactagcagttgaaagcgtaagtgggtgacgtaataaactcttcggcgtcatcaatactaatggtcgaacagcttctgttcctaagatagatgcttgacgacgcaggatatggaagtattgagccgcgctcgttaagtttgcaactgtccagttattctcagcagctaactgtaagaaacgctctggacgtgcactagagtgctctggtccttgaccttcataaccgtgtggtaatagaagaactaagccagatttttgaccccattttgctcttccagctgaaacatattgatcaaataatgcttgcgcagtatttgagaagtcaccatattgcgcttcccacataacaagagtttctggagcgaatacgttataaccatattcgtaaccaacaacagcagcctctgataacggactgttatgaacagagaatgaagcattaatgtttggtaagcgatgtaatggtgaatatgtttcatttgtatcagtatcgtgtaatacgatatgacggtgtgcgaatgtaccacgctgtgaatcttgaccagttaaacgaattggcgtaccttcttgtaaaatagaagcgaatgctaatgattcagcaagtgcccattcaattttgccgttctcttcaagagcatctttacggcgctcaagaattttcttcactttcggatatacgttaaagccttctggccaagatagtagaccttcattaattgcacgaagtgagtcaatctcaacgccagtatcaattgactgaataccttttgcaacaacatctggtactttaacgtgaattgttgcatcactcgtatcagctggtggtacgagtgcatagtcggattttaattgctcttgtataaactgtgtaattgtttcaacctcatctgcatttagaacaccagcagcttgtaattgatctgcataaattgctcttacagttggatggtttttaatttttttgtacacttgtggttgcgtaactgccgggtcatccatttcgttatgaccgtagcggcggtaaccaattaaatcgattaagaagtcttttttgaacaacatgcgatattgaatcgcaaggttagcagctgcaagacaagcttccggatcatcagcattcacgtgaacaatcggaatatcgaaaccttttgcaaggtcacttgaatatttcgtagaacgagaatcatagctatcagtcgtaaaaccaactgcattgtttgcgataacatgaatcgttccgcctgtttgatacgcgttcaatctgcttaagttgagtgtctcagatacaataccttgaccagggaatgcagcatcaccatgaactaaaattacgaatgattttgaagtatcttgatctggaagaccagattttttacgattctcttgagccgcacgtgcgaaaccttctactacaggattcacgaactcaagatgactcgggttatttgctaatgtaacgcgagtactaacttcttcgttactaacgacttgttctctacctaaatggtatttcacgtcgccagtccagccagaattagccactgcgccttctatttttgcatgtttgaactcagcaaacatgtggctatatggtttttctaatacgtgagcaagtacgcttaggcgaccgcggtgagccataccaatcatgacatcctctacgccgttcttagcaccttctagaacaatttcatctaaaacaggtacaagcatatcaacgccctcgatagagaaacgtttttgcccaacgaatgttttatgcaagaattgctcgaaaccttcaacagctgttaaacgttttaaaagagcagttcgttttttatttgatagtggttgacgcaatgaatttgattccaccatttgatgcaaccacgcgcgttcttcactatcttgtatatgagaaaattcataagctaaagattttgtataaacgtcttttaatctatgaattacatcaagtgcagtgtgaataccttctggtgcatcttgccataccgttttcgctggaatcgctttcaagtcagcatcgctcagttcgttcattgctttctcaagaagagattgtccatttgcagcatcttccatcgggttgatgtgagccaacgtgtgcccgaaagaacgaatctgctcaacaagttgaacgactttaagaattttttcaatgttacctgtgttttgaggagaaaaatgtgttgctgtgttgtcccctgttacgacatcatcttgaaacgaaggagctccaaaaatttcaaaaagctcttgtaattccggatcaacagaacctgctccagttacgtaaagatcatactgctcaataacataaccaaggttcggaccgtggaacttggcccaagggtttgtcgttgtattcttcctcgtcatttgtttaaacctcccaatgcatataatccttttccatacaaaggtgcattttgctctttttcaataagtaatgaatcaataatcaatgtaaatgtttttctttactcttatgttattacaataatttacataataccaaacactattacttatctgttttgtaaaaaaacattcacaataacttatcacccaagttaatctttcatgttataaagtaattttacagaaaaatggggtggatatatttggtatgcctatactaatagctataattgttgcatttaaatataggtataatagttagaatgtttcgataaaaacagtttgaattatgtatattgaaataataagcgctttcatagatattatacaacaatataacggaatatagtataaaaaataaaaaattatgaatttatcgtaaactttatttagatagtgttaaatattgaaaggaaagtgaaggatttctacaaaaaaagttgctaaacataaaaaatgctccataaacagttagtttctataaatatgacgaaaaacaccgtaaaacaaataacgcatttcgtgaaataaagaaataaatgaaatattttaaaaggataaaacaaatatggagatattaaattttaaaaaaagaagtgaggagatatagtaacagttatttacagtgttccgtgtttcgcttcaaaatagacgtgctgaaatttaaaaaagtttcttctatataaatagcgtgaataataatcaaaatatatgtaaagggaacttgacgtaaagtttactttacatatatactcggtatatggaaggagggagaaatttccttggaaaataaaatggtcgaataccgaaaaaaatttggactatctcaagaaaagttggctgagaaacttggagtttccagacaaaccattatctcaattgaaaaagggaaatacgatccatcacttccgctagcatttgaaatagcgaaaacatttcagacaacaatagaacatgtatttatttatgaaggaaaagaagagggggaatagggatgaattattcacaaaagtactttgtaattatggggattatttttctatttatgagtggatttatgatattaacaggtataatgacgcattctgcaccgccagccataacgtatccattgctggggatgatgattatgtgtttctgtctaagctacttgcatccgcaatttaaagaaaaagacgagcgaatgaaactgattcgttataaaggaatgtttgtaaccttttttgcattaacggcatattatcttcttttctctatcggcttaaacttaaaaatacttacactatcagctactgaattattgaatatacttatggcacttacaatgagtaccgtctttatctcatttgttgttttagcaaaaagatattaagatggaggagagaaaggaagattaacatatgcaaatgatgtatgcttttggcattgggcttgtattatttttagccgtattcttatttattcgtaaagacgttcaaggtgggacgttaacgaagcgaggattttataaattaatcggctgtttagttgttatgcttatagcaattattgtaatgatcgtattaattaatcagtcactatagaatgtaaaaacggaaccttacttcggtaaggttttttttattattaaacctaaaaattaccaccaaatccatttaccgtaaataatttgtgttatataatccaatgaaatgatagataaggagtgtagtatttgaataaaagaactatcttctatttattaacttgtatactactggtagctagtactacttatataatatgtaacaaaagagaacaagtgccacctatattagtatgggacgaacaagaatactatgttacgaatgaacctgtcaaagtagaagaagttgggcaaaaacttggcgaagtaacaaagaaaattaaaacaagtaaaaaacctactaaaaatagagaatctaatacattacaagagaaaacagaagtattcataatgattgaggaagaaaaaagtgattacccgcctttaatcataaaggaagcttatagtgatgaatatagggtagtgaggccgatgttgaagcaagtattatgatgaaaaggaggttcatatgcagacactaactccgcatccgtagtcgttaagaaaaatatttgtctttttcctcctatcggtgccgcttacattttgatgaatagaggagcaatacaaaagagagattacattttatatttattatttgctactatgaatatatcactctggttatcgcttatgatttttgatcggagtatgtggatggtagcagggcattatgtgtttggagcagttgttgttgtttcgaatatgaataagagataagccagcaacctcaaagttgctggtttttattttgctatttataataaagaaacaaatttttaatagagagtagtgggcgttatgagatggaaagagggaacgtttgaaaaaatagacacgaatgactcacctgttgagcaacttataaacacgtttaaggaacaaaacttaattggtggagcaataataagctgttttaaagtgcataacgaaaatttttttaaagaaataccacattcgaaagatggacatgagcacttctttagaagaatcttcaactctttagacataatcaataacttagaagagttaaaaatacatacatcagacaaatataagttttgttttaaagagcagctcgcagtcatgcttgatggtagcattgctgcgcaaattttgtggggcggagcatatgaagggtttaaggaacgaccagttatcgcaaaacaattagcagtcaatgtatgtcaatatatgttccaagatcgatacgaagatattaaagtgttcgaaagctatcgcccttggacagattggttttacgatgttgcgtgggatgttacttggatggtgttagatagtagggaacagaaaatgtggttcatttgtgctacggatacagattgatagaagccgggccttgtaggaatgctgcaaggccctttatcttttgggaattaatagaaaacgaatcatataaatgatatactaaaaaatgtttgtaatgtcagtttcatactattatataatgctgacttactagaaaagataagaggagaatgagcgtgcaaaagataaagagattattgctattaatgatggtagtaggattaacagcagttgttttagcagggtgtgcaaatccgaaagatactacagaagaatttttaacagcgatacaaaaaggtgatgtagaaaaggctcgtacatttgttgagagtgacaaggaatttaataaactaaatgaaaaaacagatgatgctgaggcaaaagcaatgctaagtgcaattacaaaaacctttaaatttgaaaagctagaagaagtatcgaaaaaggatgacaaagcagaagtgaaagtgaaaattacatctgctgatctatccgttgctgtaacaaaagcagtgggagaagttatgccaatggcgttcgctagtgcctttagtgaagacaaagaacaatctgaaaaagcaatcgaaaaaacaatgacatcaactatcgtcaaaaacttagcagataaagatgcagcaatggcaactcgcgaagttacattgaacttaaagaaagacaaagatggcgactataaaatcgttgctgacgataacttgaaagaagtattgtttgccaatgcgaagtctttggagaagatgtttggtgggaagtaattgaattagataaaaagagacaccatatcacgtagaatggtcatctccctgtcaagtagacagaaataaaaagagtattatgccacggccttttcccgatattctatcggggaaaggccgaaaatgtacatatttattcaagcgttaatgtacatatttaagttagcatttatacctcttggaaatgcgatgatgaagaaaatcgaaatatacgctgggttaaaggtttacgagaaagcttagatccttatacactaggtgactatgtgaactggcccgatatcgatattaaaaattggcaaactagttattatggctctaactttcacagattacgtaaagtaaaaaccatgtatgatccttgtgatgtttttcatttccaacaaagtattcctccttttcatacatgaaaaaaggggataacataaaaaaatcatccaatataccgttacctcgcagtatgttggatgattcaagttgattttctatatcgtttcaaattcttgctcctactcataaacttttacttacagattaattgtatttcgtatcattttcatgcaatgaatgtaatttaatatttggtactttatctttttcaatacctctattataagaaacaggaacttgaaattcgaattgctttgtctcatgtttttgtaaatagactggtttcggtactggatagctttttgaattctcgtttgcattatcgtataaaacaacttttaatgcttgtgaatgattacgataattttttaaagtaacaatgcacttcggttggatattctctccatttttctccattctacactggctatcttcttttttatattctattgcttctacccctgtttttcctgcgtagtaccatgttttattcaatgtctggaggattgtatttaaaataaacggcatcattacaatcaaaatactaatgcctactacttttatcttattcgtttttctaaatgtactagactccttttttcctagccattttaaaaataatataaatgcaattacatgtagtatgaaagaaacaatcaatatatttgagactttataatccatataaacatacgtatgtatcggaaccttatagacattgaatagtttttccccaattaattcattatcatttggaatttttaataataacaaaacccctatactgtaacaaatagctactaatcgatcatactcaatacgaatcattctttctccccttcactttgtattttattatcgattttagctattattaccatactatacaatctttttatagaggataacgtaaaaaagttccttataaatatataaagaaccttattaatatacactatgaattaaaaaatcaatatacaattttcacatagagatttcttcaaaatatgttggattatgtattgtaatttttttatctaaaattgtaacaatgctatcattttttaattgttttaatacgctgctaactgtctctcgagatgttccagatattttagatatttcaattgttgtaagtggacatgaaattacaatcttttctccactctgttctcctaaatcctgcattaaataatttaacgtttggataacacgatcttgtgcattaggaattgtaatattttgcactcgattttcgttcaattttaatatagatgataattgctgaacaacgtacatcaattgcgttctgctggactttaccatatcttcaaagattaccgttggaatataatatacctccacatccgtcattgcttctgctgtatagttatatcctctgtctgtaaacataccaccataaggaaaaatagaatatcgcttcacatagtcatcgtataataagttcccattttgattaacccgctctaactttacaaaaccatctaacatgaagtaaattctttctcttgaatccccttctaaaaataaaaattgaccttttttataagttcgccaataaacaaactctgttaagcctttcaattttttttctgttaaatgagcaaataattcgaactgctttaagtctttcactacgttccgtctattcataaaattccctctctcttgctgtatgttggagcgaaaaaatcaagaaagcgtattcaatttgaattttatcataattaacttacatattcagatttcatcatgaaaactttatgaacaatgagtacaaaaaatattaataaataaaaagaatgaagttactaactccattcttttttactactaagtagcgtacataagaatttaaacatacatgcatacattctgttttgaaataatagtaccagctttttcttctagtgcttcatatactttttctaaagacgtaataattgtttttctttttggatttgtattaacaaaattaatagcagcttcaattttcggaagcatgcttcccgcagcgaattgttgttcttcaatatattcttctaattgattcactgtgacatgctctaattttttttgattcggttgattataatttacatacacatgatcaactgcagttaaaataacgagcgtatcggcatctactaattctgctaatttctgtgcagcgaaatctttatcgataaccgcttcagttccttttagcccttcttcggaatcaattactggaattccacctccgccaacagctatcactatatttccatcttcgaccaaagaattaatcactttatgttcatgaatacttacaggcttcggtgatggaacaacacgtctccatcctctaccagcatcttctttaaacactgcttttgtttcatccattaatcttctggcctcttcttctgtataaaaaggaccgattggtttagttggatttttaaatgcctcatcttttttatccacaacaacgcgtgttataaccgttgctacgtctttttttatattccgttttttcaatgccttttcaatcgcattttccatccaatatccaatcattccttggctcattgccccacaagtatctaatggcattgcaggtgtcttttccgtttctgcagctttttgctgtaataaaatattccccacttgtgggccatttccatgcgcaattactatatccacatcattttccattattttcacaagttgttctgccgttttttccaacgcttcttgctgcgctcccgcagtagcttctccagactgtatcgcatttccccctagtgcaactacaatttttcttcgtgccatattccagccctccagttgatttcgctttcacagcgctttataaagtaatactgcctgtaattaatccataaatcgcaaagaatgctaaagcaccaattgctacggatgatgctaattccactcgagtaaatatttgcttcgaactcttttgcttttgaacattgtaaaaaataaaaatacctggcgcatataaagtcattgttaataataaatactctaaaccagctgcataaactagccacacgccataaatactggctatcaagccaattattatatttttatttcgatctgcttcttcagactttaagctatgcttcagttgataaaacgctgaaaaagcatatgggattaaaatagctgaagatgctaaagagaatgcaaagttatacgcctgatcagaaacgacgaatgttaacaagaacatttgtattaaaccatttgttatccataatgaatttactggagccttatttttattttcttttgcaaaccattttggaaatactccatctttagccgctaaatatggaatttcagaagcgagcaaagtccaacctaaccaagcacctaatacagagatgaccaaacctaaattaataaaaatagcaccccattttccaacaacactttcaaataaataagccatagccggatttttcaaacctgcaatatctgcttgctgcataagtccaagagacaataatgtgattaaaatataaatgatgagtgtaccaattaagccaataacggttgctttccctacatcacttctattttttgctcgactggataaaacaacagccccttctaccccaataaatacccataaagttacaagcattgtacttttaacttggctgccaactgctccccatgaaaaagaaccagtttgcccccaaaatccatctaagaacgtatcaatatgaaacgcgaagattcctatgacaataaatacaaatacaggtactaattttgcgattgtagttactaaattcacaagtgctgctgattgaactccacgtaaaattaacatgtgaacacaccataataatacgcttgcaccaataatggacgctacattttgcccgccttcaaagattgggaagaaatatcctaatgaagaaaacaataatgtaccgtaagctacattcccaagccaagcagatagccagtatccccacgcactattaaatcccataaaattaccaaatcctgcttttgcatagctaaaaataccaccatctaaatctggccgttttacagttagattttgaaaagataatccaagtgcaatcatcccaattcctgttataacccagccaataataatggctccagcaccagcaccttttgccatatcactcgctaaattaaaggctccaccgccaatcatagacccaactacaagagccgttagtgtaaacaaccctaatttcttatcttcacccattccactcacctctcttaaattgcaataacaatacaaaagcaatagtgaatgatagtgtctaaaggaggagaaagaagaaaggaagactccctttcttctttactccatatttcctaaagtagctgccataaccgctttaattgtatgcattctattttcagcttgatcaaatacttttgaatgtttactgcggaatacttcgtcagttacctccatttctttcaacccatatttctcataaacttcttcgccatacatcgtttcaacatcatgaaatgcaggtaaacaatgtaagaaaatcacgttttcattccctgttgctttaatcattttcatatttacttgataaggtttcaataactcgacacgttcagcaaatttttcttcttcccccatagacacccatacatctgtataaattacatctgcattcgcaacagcttcttccacattacttgttatcattacctgttcattatatttttttgctaaatcaattacttcttgtgcaggccataaagattccggtgtacaaatacatacatccattccaacgattgctccaccaactagtaagctattagcaacattatttcgtccatcgccaacgtaaacgagcttcacatttttcaatttccctagatgttctctaattgttaataaatctgctagtgtttgtgttggatgccacatatctgttaatccattccaaaccggtacaccagaattttgtgctaaagattctacggtttcatgatgaaatccacgaaactcaattccgtcaaacatacgccctaacacttttgctgtatcctctacagattcttttttcccaagttgaatatcacctttccctaaatattcaggatttgcccctaaatctgtacatgctactgtaaatgcacaacgcgtacgagtagaagttttttcaaataaaagcgctacatttttaccttctaaataatgatgcggaataccatttttctttttctcttttaattctgctgccaaatctagaaaatataacaattcttcttgtgtaaaatctttttctgctagaaagcttcttccttttaaatttggtctagtcattaacataattcatccctactttctccgttatttatactaaatatctttacgaacaattggcatactcatgcaacgtggacccccacgaccacgagataattccgaacttagaacctcaatcacttctataccgtgttcccgtaataacgtattagatacatagttgcgatcatatgtaacaactacacctggcgcgattgctaatgtgttcgagccatcattccattgttcacgagcagaagcaattacatctcctcctccacatggaataagaactaattcacttaagcctaatacctcttttaatgcttccattaaagacgtacgatgtgtaattttaagagtttcctcatctgatcctttttctaaaatataaatattcatattcccttttggtccttgaatggctgggtgaattgtaaacttgtcatagtcaaccattgtaaatactgtatctaaatgcataaatgctcgacattttggaatttctattgctaacactttcttaattttattttgtcggctaaagagatttttagctaaacgttcaattgctttagctgaagtacgagcagatactccaatcgcaattgtttcttcatttaaaattagctcgtcgccaccttcaattggaaatttataatcacgatctaaccagattggtacattatgttttgcaaatcttggatgatatttaatgatgtactccatgaataatgattcacgtctacgcgctggttctctcatcttatttatcgttaagccatcgcccacgctagctgctggatcacgagtaaaatataaattaggcattggatctaagtaaaacggatagtgatcttccattaattcatataaatgtgtcttcttacttgtttcaatttcgtttttccgtacaccacccataattttttgaattaattcttcatttgaaaaggaaagtaaatattcttttaaagtttgatgtgcaacatttacgtcggcctgtccttcttttaaaatacgatcaacaaattcttctcgaagttttttatctactaacgcctcagcggctagtttttctaaataaagaacttcaacaccccgattgcgtaacgtttgtgcaaaataatcatgctctttttgaataattggtaagtatggaatatcgtcaaataataattgctgcaaataatctggcgtcaagttttccacttctttacccggtcgttttaataaaaccgtttgtaattccccaatttctgaagtaacatgtatcggatgtttcatttgttgtacctccttttaaatatgtttgatgtcttacaagtacataataaatgctctacactttcatctttgtgaaagtatccacattatcattgtgaaatattaaacaagttatttttttaaaatcatacgaatatgtatttttataacaaactatctcgctttctcaataaaaaatacatatattacgcatatatgttgaatatttaacttccgtatttaaacaaaaatcctgtttttaattttattaaaaacaggatttttgcatctaaataattaaatttaatctttcttctataatctccctatctgatttcgactgtgaaattataaggcatgtatcatttccgcatatacatcctattttttctttccaatctaactcatcaaataaaacaccaataacatgtgcattaccaggtaatgttttaataaccattaattgatctacacaatcaatttttacaaccacttctcgtaattttttctttaactttatatcagtttgtacatgctcttctgagaaaactttatatatcattaatccttcttgagaaggtaccttcgttaagtttaactcacgaatatcgcgagaaaccgtagcttgtgttactaatacatctttttttgctaacaattctactaatctttcttgcttatctatttcatactcctttacaaattgtttaattaaccgttgtcttttttcttttttcataaaagacaccccttttaatattatagctcgctataattttcatccgaaagggacagaaaagaatgttgcggaaacgttcatagtttaactgtaaatattaaatcaagctaaataaaaaagagaagaacagcattctgttcttccttttacattgaaaatcgttcaattgtttgtttcaagtcagttgcttgcttctctaaatcctttaataattgatcgattactatcatatttttagactgttgtagcgtcacacgcgccacttcttgcgaaccagctgacgtttcttcagcaattgctgctacagcttttgtttgtgctcctgtttgatgaatgtggctcacttgttcattcatataactactaatttgctgagttgcatcggctacttccataacacttgatgacatttcttttaaaattaattccgtagcttccccacgtttcgcctcttctttagctattttcacttgttctgtcattttcattgcaacttgttgtacttcatcttgcatattccgtaataactgcgatatgtttcttgcagaatgatcactttcatcagcaagtttccgtacttcttccgcaacaaccgcaaagcctcttccatgctctcctgcgcgagctgcctcaatagaagcatttagtgctaataaattcgtttggctagcaatcgcactcacaacagacacaatatgttctacttgtttcattcgttcttctaacttctgtacattttgcattgaatcttcattttcttttgccaatgtttgaataccttgaattaaagacgtaaagacacgagtactatgccctaaagcttcaaccatttctgaagacaatgtatcagactgcttcgctttttcttctacttcacttgcaatagaagtcgttgtatcaacagcagaaacaattgcttgaattgatgccgctgattgctcagcgcctgaagaaatttctgcaagtgtctcagatacaccttgcgcttgtctcgttgcttcgcctgtttgttttctaatctgctgtacttgattatttgtatacgaaaatgttgtatcaatattttttaccatgccccttaagtttcctaacatcatattaaatgcaacacttaaagatttaatttcatcatctgtcttcggtaatggaacatcttcacgaatatcaccctcagctgcttttcttgccgcctcctctaacttgcgaagcggtttaattaaaaatacggctgctccatatgctaaaattccagaccatactacccctaataacataacgataatattatatacagtttgacttacataactttgaaaataatcgtatatcacgtaaataaaaaagatacttgttgaatatgtaatgaaagctaaaactgtagtgaatagcataagttgtgtacgtaatccaaaagaaaatgttttcctttctttttccatcttccctttccccctttttataagcaatataaatactacctatatattattatccatattttcattatagaaggatatagagattttaaaaaaatattatttctttgaatatcaaattgcacgaaaaaaataaaggattctgacaatttatgactaataacagaaataaggggcaacatttgtaaaatatatttttaactgggggttttgtatgattcaagttcgaaatctagtaaaatcattcggttcacttgatgtgttaaaaggaattgatttagaagtaaaagaaaaagaagttgttgttttaattggtgccagtggttctggtaaaagtacattacttcgctgtcttaactttttagaaatgtacgatgaaggcgaaattcacttacaaggtgagcgaattgatccaaagcattcaaatttaaataaagtccgtgaaaatgtcggtatggtttttcagcactttaacctctttcctcatatgacctcactagaaaacatcatagaagcacctattcacgtaaaaaaattagagaaagcaaatgcaaaggatattggaactcaacttctccaaaaagtcggccttcaagataaagcagatgtaactcctcatcttctttcaggtggtcaaaaacagcgcattgccattgcacgagctcttgcaatgagccctaagattatgctatttgatgagcctacctcagctttagaccctgaacttgttggagaagtattgcaagttatgaaagaacttgctgaagaagggatgacaatggttattgttactcatgaaatgaattttgcaagagatgtagctgatcgcgtcatctttatggatgatggaaagattgtagaagatgctccgccagcacaattcttttcagctccatcacatgaacgggcaaaacaatttttacgcaacgttttataatgtaacttttgtttcgaacgaaaaacaatacattcatacggtgcacaactaatcatctaaataaaatatttcaataacatactaaaaaaccatccgtatgatcaatatataggaggggttttatgaaaagaaaactattaaccattgttgcgagcattacactatgtacatctttcatactaggagcttgtagcaaagaaagctctactacttcaacaaatggtgaaaaagaatttcgctatgcgatgagtggattatacaaaccttttaactataaagaaaatgacagcaaacttgtcggttttgatgtagaaatcggtgaagctcttgctaaaaagatgaacatgaaggctacgccagttacaaacccatgggaaacgctgattcaaggtcttcaagcgaagaaatatgatgtaatactgggtagtatggcaattacagaggagcgcttaaaagctgttagtttctcaaatccgtactatcgctctggcgcccaaatttttgtagctaaaaagaataacgctatctcttctccagaagatttaaaaggtaagaaaattggtgttgtaaaagctagtacctttaaaaatcttgttgcaaaatatacagatcaaatcacagaatatgacagcgatattactgctcttatggatttagagcctgggcgtgttgatgcagtaattacggatcaaatggttggtctacgtatgataaaagaaggaaaatcgaatataaaagaagccggaaaaccattaaatcttgatgaaatgggaattgctattcgcaaagatgataaagaaatggttgagaaagtaaataaagcgttagatgaaatcattaaagatggtacgtatgaaaaaatcagtaaaaaatggttcgggcgtaatattctcggtgaagaggaaaaaacgaagtaagttagccattcaaaagattcataaacagtgccccactgattaaatgttcattttatgtggggcatttcattctctactaaaatctatacaatatgaggtgaaacacatgtttgaaatttttatctctacctatcccacactcttaaaggctactattgtcacattacaattaacattaacctccctagtactcggttcattaattggattattatttgctttctttcgaatctcgaataacaaagttttaaatagcattgctcatatctatattgctattattcgtggtacacctttaatcgttcaaatcgcaattctctattttggcattacatctgtcattgttttctcccctttttgggcaggagcaatcgctttagcaattcataacggtgcatatattacggaaattttccgaggatccattcaatccgtcgaccggggacaattggaagccgctcgctccttaggtatgccttaccctttagctatgcgccggattatattaccacaagcatttcgtctgtctcttcctcctctaggaaaccaatttattatcggattaaaagactcttcactcgtcgcttacgtaggactgtccgaattatggggatcaggtttatcaattgcagcaggtaacttccaacaattagatacttacataatcgttggtgtatactatctcgtacttgttcttctatttacttattttgttaatcttttagaaaaacgactacaacgaaaagaaactaactccgtccaattccataaaaagaacaaaaaggaagtttctttataagaaaaagcaagcctgagatggcttgctttttcattgcaaaaatatattaatttttactgatttacttttttaatactcttttcttcctctatatgttcctcacgatatgaaatattatgaggatctagtccatttcctaaagaaccatagaaatgctctctatgcggatcaactaattcacttccttgataatacacgcgtggtgtattccatagcgctgccaaagcttttgtcatcggcatctcatgatagcgttccggccacatttctttaatcttctcttttactaacgggtagtatttagaactcatagcaggaaacagatgatgttctgtatgatatgagaaattgaagtgtaaaacgtctacccagcgcggcactgttactgacaaacagtttgctaacggatcatttactggaacaattggatttaagcggtgatttgttgcgatatatgccattacaataaagttagcaattaacaacggaatgacatatgcaaataaccattttccaggtcccataataaacaataaactaatccaaactgtccaaggcaaaagaagttgaagccatacagatttttgattggatgacttgaactcttttataaaatgaaagaacattcgagtcgaatgcaatgtaaattgaattgttagtgacagaaaactaaagaatgaacgtacatgtaaaggcatacgatatacccaactcaaaaacttactcttcttaagtttctcaagtgtcggccatgcatccggatcattctcttcatgctgtgtatgaacatgatgcgttgcattatgccactttctccaaagctttggccctgttgataatggcataaatgcaatcgcgcctaagaagtcacgaagccatgcctttcttacaacagttccatgtaaaatttcatgccctaaaaatccaagtgaagcaaaacataatccaagaacaatcgcaattcctagattcgcccacacattcaattcaaatacaccaatcgatattaaccccgccaatgccacaagcaaataagccagtccaccaaataaacgagtaggcactggtttaaatgcttttttcggcaaatgtggtgatacacgtgctgcataccacccaaacgtatgaagctccttcatccttttgctcctttcttatgccgcgccttgcgcaacttacatatatcaattcttgcttccagattgattttactagatgatccaaaaagcatctattataaggaaaatatactcactctatcgtcacttatttttcgcttttattatcaatgaaaaacatttctctttttactctctatcaacctttccacatgatgaatcataacaatagaatttctatattgtcaacaccttttatgacctagtaataaaaggtggttatatttttataatcatactttatttcactaaagaaaatgtatagattccataaggatttacccactatatatagacattttcttaaacgtcatagactctatctcattcaataactccctatgtaatcaacaaacagaatcacttgaatttagttttatataaatcctaccacttcataatgccccatctaattaattatattaaaataatttataacctcttttaataaaaatagactacttctaaaacaacacacatgaatttcatatattatggaaatattaaaaggaaaattgttctaaaatcaggaggtttccgcaatgacaagtgatacatttccacaactgccgctatcttattggattgaatctactcagtttcctactttccctcgtttatccgaaaatataaagacgaaagttgctattatcggtgctggtattacaggtattactactgcctatttacttgcaaaagaaggcatcgatgttgttttaattgattctggtcgtattttaaacggaacgactgggcatacaacagcgaaagtaacagcacaacatgatcttatttatgatgaattaataaaccatttcggtgtagaaaaggccgggctttactatgaatcaaataatcaggctctacaattcataaatgaaactgttcaaacatataaaatcgactgtaatttctcaaatgaagattcatatttatatacaactaccgataacggattaagaaatttatcgaaagaatatgaagcttatcaaaaattaaatataccttgtgactatgttcaatctctatcgattcctattccagtacaatctgcgcttataatgaaaaatcaagcacaattccatccccttctttatttaaaaacacttttagaaaagtttgtggagatgggcggaaagctctacgaacaaacaacagctatggatgtggaaaagggagatcatccacaaataattacaaaagagggccatcatacatgcccatcaacttaagaatttgcactacccccaagtgtcaaaaaacgttattcttcatttcaattaatggaaaaccgtagagtttctatccttaagttgatgggcatgtgatactacccctactactattttttgaggcaagtttatgagttaataaaagatttatggcaatgtaatgcttcaaatattacaaggatgttctctaaaaactatgctttcgggcaatattatggttcaaattgtggcggacttataattcaaatcacaaaataaatcggatgctagaagaccaaaataaagttaatagaccaatactcactgatgatacaaaagaaagaatccaacgctctttacagcaatccttagaatacaatgaagaggtattcctctcttactacagaaagggatatttacatcaccaatacataacagtgacttctatagatccaggaaacaaattgattcattgtcttgatgcttttaatacacatacacaattaaaatttgatgaattaattgatattaaataaaaagaatgcatacacaatcgtacaatttattaagaagactccattctgaaaaaatttaatcaaaatggagtcttttgttagaaatattcatttgtttttttaaaatactgaaaataattaatgcaaaatagttatttaaaagagttaaacccctaacggtacgttaagaggctgtgattaacaaactcttactaaaaatacatgagattgatgaagaaatatgataattgatccctcgcattatagcactaaattaatttaaatttcaacttgataaattttcgtgtgcattcaatttattaaaatacgtattatccgttcaaacgatactaaaaatttaaaatggtataagcatatttatagacctgtcttttattgttcatataaaataaaaaagtacgaaataccctattttgtatgtgatcctgcaaggtaacttgtgggattttttattgtcattaaatcggagggattatatgggatactttaatgttgaattaatgaaagctgaaattactcaagaagaagctatatatagttacaaattatatacaaaggatagctgacaataaggcagataaattatatgctgccgaagtaattgagagagttcataatgaggatagctcaacgaaagatattgattttattatacgttgtcgtaaaatgctataaaacaaaaaggaactctgcaatattaaagagttccttttttatattgtattgaaaaaattttatgtttcttaaaaatgctcttagaatttcaggataaagtgagtaaaatgcatatgtagaaaggaggttttacaatatgcaaaatcaaacaaaaacttttcatttgaaaataaaatttttcggattcaaaataagtattaattattccttttaaaagaatctagcctgtttttatttgagtactaaaaggtaggatatctcttattcctatcttttagtttaacaccattattttcatgaatttttagactgtaacaattttattagatcctaaaatctctaaacttttctctaaaactttctcattatcaatgataataacatgcaatttttttctagctcttgtcatcatttgatagagcatttttgtattatcataatagtaatcttttttacttgttagtaaatttttattgtaaaaaaagttagaatctatcactacaattacattatcaaattcctgtccaataacctcatgtgcgcttttattatctccgttttgatacacttcatatggataatatttatttccgtaaccaggcgtataatttatagccttccatcccctatcagtcagttcttgaatataatccctcacactagtatgaccctcaaaatactgcacgctaatattagaataaatttgatgtgcattactttttgatgtatcaaacaaatttgtgataaaggaaataatctctttattggttctaattgtttttgtcaatggaaaatgtcttggagatacctcagcttttaaaaattcaggaatattattgctaacttcccaactagccagacattgattaggatcatatgaaaaaatacatttcacattgttatcattaatcctttgtaatatttcctctaattggtctttacgtatgcgttgaacttcgtctatgacaatcagatcatattcattaaaggtataactttcatagtatcttatacctgttacttcccaatcataaaacattagctttctatgcccagcatttacagttccacaatgaataataagtactcttttggagttatttatatattcttttgcaatatcatacgctaaaagagttttaccagttccagcagctccttcaattgcaatataggatggtcctccctcctgtcttaaatttataatctcagttttatagttatcttgatgttcagtcaaaaaatactgattctctagaaaggcttctgtagaattgaatggtgagactaaataattacagggatcaaactcttgatgtatgtcttcaatttcaattaatttttgtttatgtatttgtttaaataaaaattcaatatcactctctttaaattcttcattttcgtttaagtaataaagcttttcttctaaggcaacgtaagtgaactgtaaaactttcttttctaaaaaactgagataatatttattacttaaaagttgctttttcattctatccccagtattttttcttttcaattctatattaataatagtttcttctccaaatcttaaaagatcaaactctttattaatttggttaattttatatcctacataaaatccctctactatttttaaaatatttacaaatgatagaagctctttaactaaagaacttaaatcttcgatttcatcttttttaactttaatgtcaaaatgttctttatataattcaaatacggaaggtgatagcttttcacttgcatcaactagagacaataaatttataggtttcacatcaatctttcccctcaacttaaaataaatatctaaacactatcttattctattaataaaataccacatttaaatgaatctggtaaaaataacaaagtacacatataaaaagcaagtaaataaaatcccagtagttaatcaaaaaacagaatattcaatttttatttttccaataacaacatcaccttgaaattccgctaacatgttaagattatggaaatatatactaatagggtgaggggattaaatatgaatgtgcaaactgtctccaaaggagaaataacaaatctactaaacaattggtatcaatccatcatttcacaacatgtactaaaatccacaaatttcaagaaagaaattgatagcaagattcatcaaattgaagaagaccaaaatatacttatctattattcattactagattttagatataagttacttacccatgacgttaaaaactataaagatagtttagaaaagatagattgtatacctgatcaagcagacaccttcctaaaatattatcatagtttttttaaagcaatttattcaattaatataggagattacacatcagctaaagagcaatacgaagaagctgaaacattattaaaggatattccagatgaacttgaaatagctgaatttaattatatgtttggttctttccactatcatatttatcagccactaccagcaatcaaatatactacaaaggcaaaggaattattttcaaagcatgcagggtatgaaatcaaagttgctgcttgtaataacacactaggtcttgcttgtacttccctcggtcagtatgaaagtgcggaagaacacttccttgcagctttaaatactttcaacaaacacgacgaggataaactatcagcaaaagtgaaacataatttagggttattgtacgcagatcaaaacctttccgaactagcaataaaatacctaaatggatcacttgtaaataaccaaaaaacattgttcttattagcgcaggagtatttcaaattaaatgataaaaatgctgtcacgttgcatattaaaaatggattaaaaatttcaaacgaagagtataatcatcatttcaatattctaaaaggattaaatgacaatataagtacagatgaattggaagaaatcattttggcaggaatttgttattttaagaaagaagagttatggaaatacgtaaaagattattcagctattttaggcaataagttttacgattcaaaatcgtatgaaaaagcgagcaagtatctacacatgacaaatgaagctgataaaaaggcttcagagaaaggagctttaaaataatgaaaaaatctctattaatttttgctattatcacaggttttttatctttcagcttcagtaacaatacaaacttacaatctgtatcaaaagaaaaagtagattttgttcaatatgcacatggtgaaactatttaacacaatgaaatactacaaagttatgtcattacccctttacaatgcataacacaaataattattaacaaaataaaaagaacctatcatgtaggttctttttatttgctgtataaagttttataagaaatgctttaacgttaccttttcagaatacagtgattttcatatgtccttaaatttataacaataacttttctacacctacgccatccattaataacagtttcaaagaaggtgatattttaattgcttcttcgatatctaaatctccaaaatccaccatatataatccaaatccttcttttccatttgcatataatagcactttcccaccttcatcatcaccaattgcaagtgagttaggtatatatttttggatattatgagcttcattcatctctatacaatctgctggactccaaatacggatatatatttcattatttacattaatctctgcatctgtacaatgttgaattatctctagataatctgaaggaacatctattgatgaaaaaccttgtaactcttgaattgtttctttagttgctggaggttcttgtgtttctaaagtgaaaactgcatttaagttctcaagtatactcattaatactcaatcctttcatattttacttttaacttatcaagcattctatattgttgttctaaagttcctctaatagtttctttagaaaatcccgctttttcaaaatcagaaactatattctttaattccgcttgtaaagaagagctccattttccatttcctaaggctacacgttcatcacgtctcaagttctgcgcattagtaataatagtatgtggtaacccctttcctgtttcaatcgtcactgttggtgcaagttttggatcatatccatattgacttaaatttgcttccgcccatttcccttgtaaaccgtgatgagattgtaacttccctccatttggacctctcccttttggtttaggcattgattgtatatgcgttttattaaaaagtacataattcgattcagcaccctttacagttttaacagcactagctgacatctttacacctttaccgattttaaccaacttcccgattggtgtaataccggctaccgccatacctccagctatgactctgtcaaaagtaccaagtttctctcccgtagacggatctacaccttcccaagcacgccgaacatcatattctccacttatttcacctgtaatatctctggctaatttattaccatcaaattctttttttcctgatgctaatgaagtttcattgtttattgtttcttcttgatttaaatcgctatacacaattttatcagattcacgtgctttttcctctgtgattttttgaattgatgcagtccagttcatatttaaatcttgtatactgaatgttccactcgcaggactaaaacctttcccactttgaacttctgcaagaccttgagcaatactcgtagctaattgaagcgctgtatcaaaattactactagaaacataattaaattcatataaatgctctagtttttcttgaagcttttgtttcatcgtatcataaattcccaccataacttgcattcctggaagggtaatactagttccttcaatgtctgctttcattcggtcaatttctcgaatttgttctcgtatttcttgttcaatgacatctgttgtagcgacttgtgattgaaaatcgttcggaaaggaattattctgtcgaattaattcttcacacaaataaataattccttgagctaaaggatgaaatgtctgtgcaaagaatgtcttccctgtatcataagttttcccttgcaaaatagtatcgcccacaaaagcatcaattgaattaataacttgttccataccttgaatagtggctacacaaaaagcattcatactttctgtttgagcttgtacttctcccaaatacatgtttaaacccatgtactccccccttaataagtaaatgataccaactaaaggataaaattgtaaactatgattttattgatttttttgataattttaactataaaatccttaatgttatttcgccgccttgtatcctacaattaattccgcaacctatttttaaaacaatcgtagcacaaagtcaattacactctcccaaaaggtacacctttagatatagtatattctttgcagcttaaactacttcaaaaggtatcaaaatgtacttaagacacacttcataagtacacacactttttgagatgtgtttgttgaatgattttatgcttattggaggaggatagtgtccctatcagttggatacaccacagagaatccccttattgtgctgtttattgtttttaatatttaatctggtacatgaaattttacaattaagttattcctttgttttacttataaaattcctatagcattctatatgaattttgtggtattatagagatagaaaatttgtttccattgtttatactctattgtacgtagcgtgaaggacaaaccttacgccctgttaactcgggcgaggtttgtcctttttttttactttaaggaggaatttactatgaaaaaaatctacaaaattggagcaattgttactactttatgtgttgcttgtattgcgatctttactttaactaagaatgaatcagtcaatacagaaactataacaccagaaaaaacaattgtatctgctgcagatgtaaaaggatcacctgagaatataaaagatatttcaaaagaagaattaaagggaaaaatacaatcccatgaagagttcattgcgtattactatcaaccaacctgtcatttttgtaaaaaagctgcaccggatatcaatcgtatgtcaaaaaagcatgatagaaccatttatcgtattgatatctctacaccagaaaatcaaagtgcctttcaagagttcgacattccaggtactccagttgttgtagcttataacagaggtgaagaaattgaacgtctagaaggagcagtgtcagctgctacctatgatggattctttgcaagacgtaattcgagcgctagctagtatagtgctcgttttttctgtttaagaaaggagaattgacatgcaacaaaacgcccgtattcattcgttagacataataagaggtatagccatactatgtatcctatttgcgaatctacccactatgacgggactagatccctttaatcaagcgggttatatcggtacagataaagtgattcgttttttagtagatttgtttatacaggcaaagttctatactattttcgcattcttatttggagtaggattttacatttttatgaaaaatacagaagcaaaaggatatcccatgtataggctatttatccgaagactatgtatcttactactcttcggtttactccaattcacctttctatggtatggagatattctacatgcgtatgccttagctggatttattctattgttcttctataagcgatctactaggcttatttttatagctggttgcagtttcctaatggttagttatgtattacatatcattgtatttttgcgagcaagttcttctatttcagaagtgcccaattactatcaatatatgtttacaggtaacactaccaatcacactgtaaatctatttatacattattctcatcaaataaaagcacgtcttttctttctaatgactcaggaattccagcaactactaataggaattccggaatatataggcttatttttaatagggttatgggctggtaagaaaaatatttttaaaagggtaccggaattaataaagaaaattagatttttacagtggagttcgttatgtatctcatgccttctctcttatcctattatctactactttataaaaacagatgtctattactctcaggatgtacaactatggattctatttggagggaaaatgctagctatattctatatttgtactctactgagagtttgtgagaataaaaaatatatagaatgcctgcacccctttatgaacgttggccagtatgctttaacgaattacatcactcaaagcatacttacgcttgtcattctttcgtggtgctttaaagatgtctcacacgtatattactggcaattatgtatctttgggcttttaattatttttgtacaaattatattcagcaagatttggagtaaatatttccgttatggtcctattgagtgggtatggagaaaaggagtttacaagaaataggggcactatatcattctgatcctattaaacattaaataaaaaagtgcaaaatctatcaacagatttcgcaccaaaaacagataaaaaatacaatcactagaaacataggagagtgtttcaccacttattataaaccatatctttacatttttgtgttgtaattttaaaatatgtaaagattcaatattttgttttaaattttctttttatttaagttatactaaactacaaaggaacaactctcctttaggccgtcaaacattatgctaacaaaacacacaccaaaaaaaccaattcccgtgtaatggaattggtttttttggtgtgcaattcagtcaatacagcaacttgaacccacattttcaaatgtagtcttattaatcttaccataattttaaaattcttaaacaaaaaaactaaatcactagtaagttacgtgaatccgctgctttttcatcaagaaatctggagtataacaacaattaagttcatactagcatgaacaacaaatgatactagtaacctattagtacgcatatatactacagctagtataactccaattaaaaaatacccaaatataaatggaaaatcaaaatgcatgatagaaaagaacaatgcgcttattagtatgctccaagttttcttaaacttagacattaaaatgtttatggccgcataacgaaaaacaaactcttctactaaaggtgcaagaagaacaattgaaacaagtgccacaggagatattgctgctgcagcgactgtactagacgtatttgctgattgcgtagttagctggaatacacccttatctaacacgctaccaaccatctgcgcaagaaatacgaatatgatcccaactaaagtccatatgaatgaatttcttgataatttaatcgaaaactttggatcatttattatttctttactatatataagaaaaatgattatcagcataagtgaaaacccaattagttcccaatgcacaagaagttgttgaattgcttgctgttggtttccctgaatatcataccagcccgtcttcgctagcaattgtacacctataatcccaacaaattgagtcattacaaaataaatgagtatgatataacctgatttatgtatattactattattcatgttaatgtattcgcctttcacttttttatttaattaacgattttgtttttaataacgaactttcattggatccagtgatgtttttcgttcgtcttttttataaaattttcatgttatttttgtaaagccatttcattttcttttttaacacgttttcgattacaccagtagcaaagattgggacccttatgattcattgatggtctatataaagttttaactggcttgctgcattttgggcatttttgtttatcatatttcacgatttcattcccctctcaaataaaaattttgtttagttcttgcagtcagctttttgctaacttcctttttatttacgatcgaagaatgataaaaattcactgtagctaaaaagttcaaattctcccgtgtcacttttaacagctatacctacatcctctggtgttctaaacatcttgaaatcttcatagttaaaccaatattctttatcaatactgaatcctcttaaattggcttttggtacgacgtacatccaatctctaagatttattagtaactcaattgaatcctgtaaaagatctagagtatcatccatatatattccccttttcccttaaataattattttgttttatttcatcgattttaaatatcagataaatcataaattgaagcatctatatgcttaataataaaaatgtcttttttagagtaactactatggttgctaaagctataaacatcaagagaaggaaaacgctctgtaagcatctttataagtaatgaacgattttgatgattgtcgattaaatccaatttttcactccgtcctttttcaaagtcggcaaattcaaatcccatttcacgtaaatattgaatgtgttcctctcggctccttttatctgttacaggagttttactgaaagaacgacaatgttctaacataaagctaagtttcactctcattccaccataggggtaatacttcgtatcatgcacatgattaaaaccttctgtattccaccattcactaacaacttcagaaagatgtttcaactgttcttttaaaccatcaactggtttatcggaacctaatttaccctgtaattcatgtatcttttgattcgcctttttaatctccgcataacgtttttctttttcttccaacagatatgattcgtaatttagtacttttgctgcttcactaaaatagctttctatcaatgatggaagtgtttttgacatttcgattgaaagtaaatctttactcacccattcacgtaattgagcattagcaaagtgcatatcctttaacaccttcagtaatacagatttttgatcctcattcaattccaatttcttttcgtccatttccccagctcctttattttcaaacaacgctttggttaattatgataatgattcttttgctattcgattcacatctttaacaattgcattatctactccatttgttattccttttattagttttaacgattcttggtatttttcgttacgtattttgtactctttatatgcctttgatgtttgctctaaattccacaaagcatttaaacgataattattaatgtcataagccaagctcagtaattcatttaattcagataaactaacctctaccacggtcttaccattctcaaaacgagattttccattagagagtttatttttaattgaatcaatcttttctttcataaacccacctacttctctacaaaattcatattttattacattaagtaattacaaatgaacactaaaaattatatataataattatataattaggtgcccatacagttatctcagactatctactaaaatcaagccgcttgcagatgctttaaacccatttctaatgcacctgttccaccaaatccctgattaaataatagtgggacatcatacttctttgcgtactcttttgctacatcaatagatacatggccacatgcacctttttgaatgacaataacatcgcatttttttataacacttcgaaacgttttctttacgcctccgtgatttttcccatcatggaaaataacctggcagtctctttttttggccaacttctctaacgttcttccatttgatccacctaaaactagaattgtactcattcccactcactctccttatctttcttctttatgtatgtacttggtgatgttaataacacaagtgtacaagcaacaatattcattaacacaaaacaaactattaataaaataatgaaaatcggggacaacaagataaaaataaagccacttaccaccaaacagatgaaaatgaagccattgctcatatcttcgtaaccatctagcccttttacaatatttaaactatgcatccatactgtgatactatcccaattttctattaacagatagccaccacccaacaaaaaagcccatccaagcaacgttcctaataatccagaatttcgtcctatataataccccgaaacaaaattcgcagctgttccaattaacattctcatttgtattcctccatatccatttcatttaacgttatatacaaatttcttttaaccatggttttattatatcagaaaattatgaatattcaataaatgtttttaggtactctttatttttttataaaagggttgtgtttttctccacaaccctcactttcttcttaatccacaggtacttcttcttgtccatgtggaatttgtgcaattggtgttacaatttgtgcatatttgtttacctgcactttaaattgtcgtggttctaagaagtttacctgttgaattaaaacttcaatatgaaacgtatctactttttttccacgatcaattttggtaatacgcgcattgtaaaattgatctccatttaggaaatacctttgaacagcttctgtagccagcatacgctcattacttgtcatcttcattggttcaataccaaatccagcctttgtaaacaaatacgggacatcataactactattagaaatttttcgtagtaaatcctctactgtttttgtctttgcgatatattcttcctcttttgtatcaaatccctttggcttatcaccaagcatctcgatttcatcttgatttacctgctcttcctcttgtacttgtgatttcatcatataacgatgaatcgtattataggtcgcaacgcctactactaacactataattaccaatataactaagtacttacgaggcagattcgctaacatattcatgactttcttcatatcatcacatcccatatcagtcgattacattacggacttgcgtcatatgttgtcctcttgccgtatagtttagacctgtaatttgtacacctttattatcaccaatatgaatcattttctgattccctaaataaatagatacatggttcggattttcatagaaaattaagtctcctggctgtgcacgaccgatatcgggcacctgttttccctgtccaatttgagcacctgtccaatcccctagttggacacctatactggttttaaacacgtattgtgtaaatcctgaacaatcagcactacctgcagctggatttctagcaccggatacatagctcactttcccttgcccaatccattttttcgcttcttccagtaccttttgtcgtttagcatttgtcattgtaggagaaccaccagatgataaccctggatcatcatttttcttaaagaatttcattggatctgttggttggtcattaatacgaatttggaaatctaaatggacagcgtatccattcatattaaggaaacctgtatctctatcaaagttagaaccgcccatttccccaataatttgcccttttgtcaccatagttcccggtgcaactgatattttactcaaatgtaagtaacgagatacaataccatttccatgatctacatagacacctagaccaccaccatttacatttcctgtttgggctgttacaatacctacttccattgaccatacagggtctccagcttttccggcggtcatggccccaatatcaactgcattatgttgctttccaccacgcactgcatcaaacgtatctgtaatacgacctgatttcgttggccatttccaacctttatcagaaatccattctccagatacatctgccacacaacctaaatctttgtaatattttaaaactttggaaacatatgtgtagagtaaacatccagcgccttattacattcctgtgataggtttccagaataacgttttttgacacttgggggtagtgcaaattcttaagttgatgggcatggggcggaccatacaaaatttgatttttaggtaaattcatatgtaccacatccttttgattttctgtgttattaaaatcaaaaccaattttcttctttatatctgtaagtaaactatcactattatcttctttttcatttagtcttgtacttacaccttcttgaagttttccatctagctcctgaaaaatctcttcttctatttcaactttaacaaattctttagcacgccatgttctcaagttttcaatgagtttctttccatttaaaccagctttattacacttttccacaattttatgtactaactgtttactaggcatttcccgataagttagtcgctcactgacaccagcttccttatatgacaaatctaccgacatattatccaacctaaaaacactttctgaattatcatttttaataaaaatagtaccttttttaataaaagctctttggaagtgaatctcatcatgatctaataaacgcttaattatctttcccatttcaatagcttactctaactctattttattttcggtagaaaattccttccccatatatgtatctaattgtttcatctctttgagaaattcaaaaggaagcataaatgatttatccgtagtattacgaccatgtgtatatcgataccccattacaggtcggttatatacctcttttacaattcctttatgcgtaaccattagtgcccctgtaatctttctctttaatatggagtcttttatgtcatttttaacctttgtccctacaacaatataaactgcatcccctatattttctttcatttgttcatattcattccctttttgttgatactttgtcttttttgcaagcgctcggggccaataaaaagtacctgcctttataaatgcttcaaattcttcgactgtgttagaaaaaaaagaaaatactctttccaattaaacctttccctattgcttatatttccaaaatatatcataacatttattcctaatatattaatacaattaacaaaaagtatgcttcctttagacctttttattaacaatttaaaaagaagattattagcaataaaccatttacattcaatcttattatgccattttctttcgcaatgtaggataccacaccatcgctatcaagttaccaaataaaaataccctcaaaacgcacagggccgtgaactaaaaggatctaacataataatttaccttataggtaatcactgttagatcctttcattacccaagatatttaaataataactcctcaggtttctttgtttatatgttttgaaaaaagttgaatgttaggtttttatagggttatttcttttaattactttaaaatcctccaaatggacctataacttctagctaattctccgtatgctctttagttttttcaaagagagaacgaattgcatcagattcaagtgtaaagatctgatgacttttctttggagtggatccctttcttaagattaggttataatcagaattataccttgttctagttttatcgaggtctttaaggtattttacatattgtgcctttttctcctcactaaagttaaacaattccccaatgtattctgtattcctaattaactcttcaaataggttctgatttcttgaatcaatgttaggattcgatagtaaaactgattctttaaaattaatagtatgctcttcggggaaaaaagatattttttcccctggacaacctaataacgcacatatttcttcttgtagctttttacgggatttctctgtgtaaccaataaaaaacaagtgtatattcttaaaggatctcatcttctctttaaaagtaatatgctgacttaattgaataggatagtatttttccttatcaacaagtttttgagcggtttcttcaaccaaatcacttgatagatagtaacgttttaaggcattgacagtttggctacctgagattccgatttcagataatattactaaatcataatctgaggtaggttctgttaaaactctcgattcaaactgatcaagtttcaattgtcttgtatgtggaaatccacttaaaactaatctgtggaacccgttatagtcctcagcggatttgatatgaaaaaatattttattcgtacatctaagagcagcttcaaccttcacaaagaatttttttatatcctcctctttaatatattgatggcttgcaattacatttagaagagcttgatgatattttgggtcaaatcttctaatccaagctattaagtcggcctcaatttcctttaattctctttcctcataaaaagattgttcctttattatgtcaactgctcgactaaagtacggagagtataaaatttctttctcgatttggatgttattgatgaaacagtctaaatttattaaatccttttctttttcatactttttatacaatttctccctaatatttatacaatcaagtgttttgctgataatgtcaggcataataaggagtaaatagccatcattagacttgtaagcaaaacaatactctgtattttctaatacattgacatcacttaatttaaatttctgcatcaaggaattaccttgttgaagttgatatatctttatgctgggccagtcttcttctggaatgacccaggtatcattgtctatatcaatcttaatttcatttaagttatcatcataatcaaaggtgcatttttttaatacatccacaatctgaagattttcttctactgatatatgggtagaaattaaatgctctaagaatcgaatctccttttcccatatctgttctaataaagtgaaatcataacagttaactgagctcatgatactattttttattgtttcaaaaacatgaccgatagagttagttttaatatcaacaggggtaaataaaagctttagtaaatcagagttttccttgtatagagaatgataatattctaggtaaagatagaaggatcttttctcttccccaagtgttttagttataatatcaattaaagatacaattgttttaaacttacacagttcaaaataaaaggcatcatctatttgatccttttccaagatagttaaaaatcttttcaaataaagtatttttaactctgcatcttcctgaatcttcttcggaaagaaatttgtatttatctcagatgtttttattgtataaggtttacccctgaataactcaatgttggtattaattttattaaagaaggttaaatgaaaattttttgtgttattctcaactacctcattttccgataatactaacttattatcataactagagaatggtattaacggaaaatacgtttctttattaattaaatcataatcacctaatatacttggaaacttttctttattttttataaactttttcttaaaaacaccaatactttcaaatactcttattatcttatcgatataagagtgaaagtctttttcgttgctcaataactgatgcagagatatataatcgtgtctgttgtatctgaaagttattgatacatactcaccgtctagccacttttcatcttttatttgaacttcctttaaataatcaaactctaaatccacaacttctttcctagaaattcgaactagtaactgattaccacgctgtagaacaattctatcattttcaataacattccgttgcccgatttttttatttggaaacattgaaacttctttttcattaataatccaattaataaattctaagttgtattttttttgaatattttctaatacattaatactttcttcattcagataatcggagatactttctgaatcttcttttgcttccatcaagaatagaacaattccagtgtggaaatgatcatataacttaagtgtatcaatattactattaccatctacgaagttatcatgaaccttgatagtcagtattgtgtttaagttatttcttgttaatggtttgagctttaaggtggaagttcttcttaaccaattgttgtaatctatattgatggtagggaaataggtatttacataagttattaaattttcccaaactcttttaatattagtgaaattttgctcagtcaatgttaatagacagcataagtgataatacttattgatagtcttcctgctgtctaaaaaatttgattcgaagtctttaggatcattagttcccatggactgattaatcttattaaaaaacatttcagaaactttaattataaattctgaagataaactattgtaaaaaattaaatcataagtattcaatatgaattctttgatgtcacgttctttctcaagagtattcagaatccgctcttctaggaattctggtatgactttttcgaatttgaaccttaaaacttttaatagagtttgatcgtgaacttttaatataaattcattttggacaaattcattttctaacaacattaaagacagtattaattctgtctcataattatttacctctgactttacaaactcatatattacattctttgtcttttctttgtcagtgtaattcttatagtatataacctcaagtaacgtgtttaggaaaactcctttgccaagtccttttagagctttggtgctttcaactaagttattgaaattattatttgttgaaaaataataacggaaatagtttctaaatagtgacccccggcctatctctaaattaaatagatagtgctcaagatttcttttttcctccaatagacgcttattattattaaaatgagtgaaataaaaactcaaattttcttcattgacttcaacaatggttggtttaaccattttgctgagtaggcgtgtagcttttttattaatgaaagatgaattggtttcttggctttttgaagagttatctataaagtacttgttatcattaaaataactttcaaagtcacttttagagttcttcacctgggaaataaggtgcttatcccaatttaaatgtaaatctaatgattctaaataagtttgtatcttgtctaaagtttctttagctttttcttcattttctagaattagaaccatgtcatcaacatatctaaagtaaaagttaaagttctcttcaagcagactttgtatgtatttatctaactcaattaaatagacttctgctaaatatctagcaaatgcggggccctgtggcacgcctttggcttccaaattatctttttcacaaagttttattaagtaatctatcaaatgattatatttactgagctgctcacttgagagtgtatttattttttctttaattatttctgagggtccatgaattaactttgtttttaatcttcctaaattaagacttgaatagaaatttttaatgtcaagttttattacgtaatgttccgcgagtatgtcatcgttaagcctttccataatattattccgatagattaaccattgttgcatccatggtttaaagatattgtagttagcaaaactattttcaaatttataaccgtaagatccatccgaaaattctgtataatagaaggcattaagtatttttataaggtatgtacttattattttttcttcagcttgaagtgcataaagacttcgaaccttactatttttttctaaacgggagaatttataaggttctcgtactgtatagttaccaacaagaacattttctatagcttctttcatatccttgacatcgatattttcaagttctaactgagtaaataagaatgcaatttcatcgttttggttagtatacttcctttgcgctttaataattttgtctatttctgatttctttacttcaaaagcatcgtaaggtaataaatcaacatcaagaaacttaagtggagatgttgtctttaattcgagaatatctttattttgaagactacaaccattttcacacttgcaattatgttgagagaacttatttcttaagaaaccacatgttggaggatgcaggttaagattctccaacttttttctggtaagttcaggtttgaaattatccattctagagaaaaagtcccaaagaatttctttcccatagttatcattttgaggggtcttcaatttattcagtagaccaacaaatattattctttcactctcacttaaattgtttggatatttctttaatatgtcatctataattgtacattgctttattttttttagaacatcctctagattttcatatgtctcttttaaggcattctttgttggtatgaatgggttagtttgtatagtaatctcttctgcttctaattttaaatttaactttaaggctacatctttaaaactttgcttttgataacgtgatagcaaagtaagttgagaagaaagaaactcttcatcaaatttatttttccatatttcagttgaatatacgaacgaataaatgttatctataaaataagaatagctctgagacttggtatgaagagataaaggcagtttcaccccaaatcctaccttattattgttattttgaccattcttaggaaaaagatcgacattgatataaggactcggattattattaatctcctcaactaacctctgtacaaactggaaagcatgtgatttttcaacaggttcagtgaatattacccaaacatgtatacctctattacctgaaaattctgtaagataatcaattttatatgaatcaagaaacttgcaaatttctcttacttcattgataagtatatcaatgtatttttgttgatctttaggaaagtccttttctagtatctttttatctatatcgaaatccaaacaaatccattttaacctagttttaacttgctgatatgtgagatagcttttctgattaattaacatatcatttattcgcaaaggatcaaaaatattattctttgtactatatttcccgttacttagttgttctgcaaaatacttcttattaatgacaaagttttcatatagttctgttgcaagactcttatataaatctctaatgtctactttaacgttcctagctagcaccgactattaacctcccacgatttcttttacttacttctctttaaaattttaacagaatgaagaattgtttgtaatagttataatggaaattctttcttcctaattttcaaaagtattaaaagacagtatttcattccataaaacataactgtacgagagctttattaatatgaagtgtctgttttaaaaagtgaggttggttttcaggagtattttagttaaagtataaaatatggactttattctgattctactaactttattgcaaagatacattattttagatttcttatcttttctaaaaattcccttagtcttctgttttcacctttcaattcgctcatttcgactaactgaataattaaattttgtttatcttctttgagcttttttatctcttcatataaccgctttattttatcttttgatgcatcagcaggtacaccttttccagtttctttgtatgcctgggaaatgattgaatacaaagcgagatcaatcaatcgttttgttaattagaattgcttgtgcttaatttggatagatacgaaacttatagactttattaattatcatttgattcacctccatttcggtatatgaccactatctaccgaacgtatattcgatatatagcgaagtaacactttaagtatgtcgaacaattaagatggctccttgccatcccttgttcaaagccaattcatctcccacctactcacttcgcgttccttgaggaaggagtcttcttggctaaaatgataaacttatacctacaatatctccttaatatatatttctttttccttttatataaactccaataacctctaaaaatatataattttagacataaatttacttataacgatcttatttatttaaattttctgtatttttatataaaacatatccaaattctgttattattaatacatatactgtaataggatgaggagaatacaatggatactttagtcacagaatatgaagtagtcgctaatatgttaaatgattggtatattgaaatccgtgcgagacgaattgataatgctcatcagctaaaagaagaaattgataatagaatgaaaggtgtctcggatcagagcttacacttatattattcactattagattttcgttataaatatatagtagataatttaaatatttcaaagggttgcttcgacaaagtagaaacttttcaaattccaaatgataatatattaacctactactatcacttctttaaagcaattcatgcaagtaccgtaggcagctattcaatagcaagagatcattatgataaggcagaagaacttctaaatgaggtatctgatgaaattgagcaggctgagttttactataaaattggtgccttccattacgatgtttacgaatcactccaatcaattaagtatgttaacaaagctaaagaaatattctcaaaacatgaaggccacgaacgaaatattggattctgtgaaaatcttttaggcatggcatgtaccaatttaagagaatgggcattagcggaagaacatcttgtaaaagcaatggatctgttccaaaaaattggagaagaaaaattcactataatggttcgtcataatttaggtttattatatgcagggcaaaatatgtctgaattagctattcgctacctctctgaagtatccgagaagaaacctaaccactataaagccattttcatcgagggcagggaacactctaaactaggaaaccaagaaactgctaatactttatttgaaagaggattacaactctgtacagaactaaacaatgaagaatatcagcatcggtttaaaattttgagagacattaataataatatcccagctgaaaaattagaagctacagttcttgcaggaatcgaatactttgaacgagaagatttatatgagtatatctatgaatgctgtaatgttctagcagaaaggatttttgaacaagggcagcatgccaaagcaggtacatacttctataaagcaattcaagctaagaaaaaagccgacgcgaaaggagctttaaaatgaaaaaactaattaaagtgatgagtattgctactgctttactatttacattgggaattacatctcaaacagatagtcacgtagtaaaagtcgttcaaagtatgatggcagacggagaccacggtggttgatattccttgacccagaatatattcctgggtctttttttattgaaacaagatataaatcgtcagttttaactatatagttgagaaggaatgcttataaaaagaaggaagtattatctacataagagacggagtttataaccaaaagattcatgtcactcattctggtgcctcaggagcacccattacttttcaaaacttccagaataaaaaggtcattttcgttgattctaaagtcaaaatagataataatagatttatttacaatagaagataaaaattatattcaagtaaatcgattagagttttacaatctaaaatcaactaaagttaacgaaccccctattgatattagaaataattatatcaataccattgaaacaactttaaagaatggaaacacatatgatatcgctgtctatggtacttcatctagtgtaaaaataattcaagtgatagtttcattgatatttgtaaataacgaatttatagcatctgtaactcaagacaaaaatgttaaagggatctttaacatttttaattaaatgaacaaagttttatcattaggagttgcaattaaagatttacccggaccaattgtgggtttattacatatataattacaaccttttaatcttatagaagctttatctcacgaaaaaatataaatataaaataaaaagccctctattgtaaggggcttttacacttcaaataggttttccttcaaataaagaataacagttaatacgttttgtttccattatttttaattagaccaatatcaaccaataactgatgatttgtacgatctacgaacaaaatattttctcatagaatacttatcccagttactagttatctattaagaaatatagaatacatcaattaattttaaccttgtccaacaattactgtaattgtatgatctaatacaccatttctataaacatatacttttgctgttgtggaaaaataagttgttaatttcccagtagaagaaacctttattaaatcattactagtacgataagtcattcctggctcatgataagtaagttgatatccattaaaaaatgttggtaaagtaactgtgtaatccctaatgttgagagtttgtgttaattttttctggtcttccctattaaaatcagtggaagcctgtgaacctgtggttccgatacctaaaatacttagaaaagcaaccgacgttacaagagcataacgaagtttcataatattaactcctccctttataaatgatttaaataacaatagggatttattaccctactagcaagataacatgaaatatatgtaaataaaaccatttgaatgggaattttctgtgaacatatattttatcaacaattgtacataaaaattaattattgactatcctataaaaaaaattaccaacaatttcttaagatatattaattttatttaataacgcgctccttcatcagaataaaaaagtttatcttcttttattaattatttgaaaatctcattaggtatattatattgatccagaaaatcactttcttgtacttaaccttccctattcaccttgttgaatagggagattaatctcttttaaaaatctcgatcttttagaaggtttcccattaattgttgctgggaatgtaatatatagattcttctttggacgagttacagcaaatggtgataggtaaccctttgaattaatctccaagttttcccccaccccgcaccgtacgtgcgactttcatcgcatacggcgctccatcttcttatatattctttacaactgttatataaaaagacttgagaccttccctccgccacttattatcatggtttcattggtactacatctctactgccatctctactcacaatcctttttaccagattattactagacgttagagacttcaaacgttccgatattgctaggtaaataactatacttaggttctacctttaccccgaattcacgttatttaaactaaagcaacccattagctttatccatcaaaatctgtacgataatttctttggagtgaatttttttattttatacatttctatataaagcttttcgaggtgtacattcagtagttcgtcatcaattatgttgaatactaaccatatatagctccctgcccgcattactttcgcagtgttgtttaacctttcctcagcattatctgttagggctactcaatgcgtcttcacccagcttcatacaaaaccgttaccagttatgcatgtgggagtatcagcagccatcttatcataggatttttttaaaggcatcctactgtggtctcacaatatcagttatcattataaaaatttataatgtggtttatccctcgttaagcgatttcaaaccaacgtttcgcaccatacattaagcgcctttcttcttctatagtagtcggtggttcagctttctctatggattcctggattatttctggagtaacttttgtggcttttttacttggtaatccttcatcatataagcctattaaaaatacatttttaaatgataatcctttactcttatgtatagttaataaataaattgcattaaatgtacctttatggtattcatctaactttttcttcatctcttcttttttttggtttaactcttgataccttttgaccataccttcccatgattgaaactgttctgtttctttttctatccattttatttcatcttttgttaactggtttctaacgagtggaaattctaaaaaatttttaataatattttccatagatactgacttcttattctttaatcgtactaactcctcaaagtaatcaataatctctttttttctatccaaagatttatttccacaaataaaatcagcaattttttgtggatttaaatatgatgaactatctccaataaagttaacaacttcttgttttttcttgtagaatgcatatgaagtttctgcaattatttggttccatcgagttaatttatcactatcttcattagatattaaaaaagctttccaatatctatatgcccttttaaatgcatccaagctaaaaatacccattaagtcgtcattagtttctattacaaaagggatattattaacctccagtttatggagtaatgttttaatttgggaagtggaacgatataaaattacactttctctataatctgggacagctttatttcctgataaaccaatatactgagattgatctataatccattcagcttcttcctctggagtaggtaaacttcgaatatagcaatcaccctcatttttatgaaaaggtttcattgatttttttatcctattgttctcattaaatgcaattacccgattcccagcttgaactatttttgaagtagaacgataatttgtcataagtttaagagtttgggtttcatacatttggttgaaatcttttatgtattttggctctgcgcctctaaaataatagatactctgatcatcatcaccaacaatgattaatttagctccgtccttcaaatctggtgggcaaataagtttaatgatatccatttgaagaggattagtatcttgaaactcatcaataaatatatactgaaatcttttttgtacatattcacgcgcttgaatatcatcttttaaaacatgaagcaaatttaacatgtaatcgtcaaaaactacaattttattactttttcgtttatcataaaattcccgcatcatcttttgaaatctttgacttaaagtttcatcacttgttggttcaagcacattaaaatgcttctctatatattttgtcatcatctctatggagaatcccatattcgtccaataacttattttttcaaataaatttttctctccagcattttcatctaattttttcaaattataatctctaattaatttatttaattctttcttatagctgctctcatccggattatctccaataatgcccatttgctctacatatggaaattgcttttttaattcattatacaggcgtataaaaaagctatgaaaggtcccaactgctactttagatttttcctcgtctaagaaaaaattcactctttctttcatctcttcagatgcttttttcgtgaacgtaatcatggctattttttcctcagggacattcttcatcagtattagatatgcagttttcgcacaaattgtctgtgtttttccacttccagcacccgcaataattctaagattcttttccatatcatatctaatagcctcaatttgctcattattaaaatcattattatcatttttaggctttaaaaaatcaaaaaaacctttatcttcatcatactcagaaagaacatgttgctctttcccttcatcatactcaagttctccataaataccttgataaagattcataactttttcagcatgcactgattcttttattttggtattaatagaatttttagcatgttcaagctctactatacttctatctaatgttttatctaatattttcttctcttcttttaacttttcattacttgcatataaattttttaatgaattatttttttccttaagttccctttctaaaacttttattttttcttggaatagttctattttataaatgctaacttaaatatgtacattaacgcttgaataaatatgtacattttacatgcctgcctgtcacgcaggagatcgccggttcgaccccggtcgggaccgccacttttgtttataccaccattagtggttttatatatagttttggctcggtagctcagtcggtagagcagaggactgaaaatcctcgtgtcggcggttcgattccgtcccgagccactctcaggatattaagtgggcccacttaatatcctttttatttatgtaattttacaaaactgagtagttattttaaaatagaacgaggagcctctagcagttgaagctagaggtttttctatagatcgtataggatgccgtgtaaaagtggatcatacatgagtctatgagaatagaggagaaaatacttaaacaaaggatgcggtcatataggacatactatgtaaacatcaatatgtttagggattattgaccatatttttataaggaggaaatagacgatgatgggaaagaaaattttagtagttgatgatgaaaagccgattgcagatattttgaagtttaacttagaaaaagaaggttttgaaatagtaatggcacatgatggtgatgaagcaattgaaaaggctaatgaagagcaaccagatatggttttattagatattatgctaccaggtaaagacggcttagaggtttgccgtgaaatacgtaaaagctcagaaatgccgattattatgcttacagcaaaggactctgagattgataaagtattagggcttgagcttggggcagatgattatgtaacgaagccatttagtacgagggaattacttgctcgtgtgaaggcgaatttacgccgccatcaacaaggtggtgctgcggaaaaagaagaaaatacagaaatggttattggaccaattgtgattaatccaaatgcatatagtgtaacgaagcgcgaggaaaatatcgagcttacacatcgtgaatttgagttgctacattatttagcgaaacatttaggacaagttatgacacgcgaacatttattacaaacagtttggggttatgactattttggagatgtgcgcacagtagacgttacagtacgtcgtttgcgtgaaaaaattgaagataatccaagccatcctactttaattgtaactagacgtggagtagggtattacttgcgtgacccagagcaggaatagtatatgaagaaagttggtttttttcaatctattcatttaaaatttgtgcttatatatatgctattaatattaatagcgatgcaagttattggagtatatttcgtaagggaattagagaagagcttagtacaaggttttagggattctttaacgcagcaaacaaacttattatcatataatttgaagcaagagtttaaaaaaagttatacaaaagcagaaacagagtcaacagatgaaacgattaaaacttcaattcgaaaatttgcctctgatcagaagaaagttatacaagaggtaagtgtatttgattcgcacagaaagttactggctatttcagatgaatcaaagcagaataaggtgaatcgaacatcaactgatatagctgttcagcgagtgttagtacaaaaaaagccagaagtgaaaattgagaaggatggtagtacaggtcatcgtgttcaagttatgcttactccgattctagatgataacggtaaggatgcgcttggtgttatttacattgtggcatctatggaagatgtatataaacaaatgaaggatataaatcaaatttttgctacgggaacagtaattgctttattagtaacggccgtacttgggattttattggctcaaacaattacaagaccaatttcagatatgcggagacaagcaatcgaaatggcaaaaggaaattattccagaaaagtaaaagtgcatagccatgatgaaattggacaactggcattatccttcaataatttatcgaaaaaattacaacaagctcgttcttctacagaaagtgaaaggcgtaaattatcatctgttttatcacatatgacagatggagtaattgctactgatcgaaaaggggatattattttactaaatgaccctgcggaaaagatgttaaatgtttctcgtgaaacagcgctcgatcaatctgttttagaggtattaggaatacaggaagaatttacgctcgatcatttatatgaagagccagattctgttttattagattttagtacgagaaacgaaccatatattttacgtgctagtttctctgttattcaaaaagaaacagggaaggcaaacggcttaattgctgtactatatgatgtaacagagcaggaacgtatagaacgggaacgccgtgagtttgtggcaaatgtctctcatgaattaaggacgccattaacgacgatgcgcagttatttagaggcacttacagatggagcatggcaggatccaaatattgcaccacaatttttaacggttacacaagaagaaacagaaagaatgattagacttgtaaatgcgttgttacagctatctaaactggatagtacagagcatcgtttaatgaaagaatgggtcgactttactgatttctttaataatattattgatcgctttgaaatgtctaaagagcaaaatgtaagtttcaaacgatctttctctaagaaatctagatttattgatatggatactgacaaaattactcaagtgctgtataacattatttctaacgcattaaagtattcaccagaaggtggaacagtaacatatcgtttacgtgatcgcggtgatttattagaaattagtgtaagtgaccaaggaatgggtattccaaaagaaaacgttgataaaatctttgaacgtttttatcgcgtagataaagctcgttcaagacaaatgggtggtacgggacttggattagcaattgcaaaagaaatgattgaggcacatggtggctctatttgggcgaagagtgaagaaggaaaagggacaactatttatttcacgttaccaatggcagcagatgaagaggacgattgggaatgagtatggaaaactttaaaacaatagttttaattaacctagttgtaattagcctatttcttacttttaatctatggacgtatgtgccagattctacatccatgcaaaacgcgaaatttgtacaggggaacgaaggaatgaaccaaactaaaatttccgatgttgtccgtcctacttctatcatcgtgcataaagataaaaatcattatgggagcagaagagaggcagatatagaatcaatctataagcctctagaattaggggaactacatgattttagagagatatcaatcactaagggtgatttcctttcatatgtgcatggtgaagggaaagttgaacttgttttccctaccgatatcccatttgatgcagttaaatccatgttcaacatgaaagagaaaagtacagataagcctaaacattttaatcgtattctccttgatccttctagaagtaaggatcaagaaattaaaattaactttgtttctgatggtgataactttaaaatatacgaggcaaaattaagtggcttgtatttaaaagatattgtaaatgcccaaaatcaatttatagtatcagcaaaaccttattttgattatcaacttaatgatatgaaaaaattatttttaccagatggaacgacagagttaagcaatataacatatatttcatctaatttagcagttgatacgtttaagaatgctctgtttagtgatcctcgttatttaagtccgattaccgagatgtcgaaagaaacatttacagatggtattagatccatggaaattgaaaacgatcgtcacatgctaaagtataaaaactcttctgtcttaactgagaaaacgatagataatttaatgcttttacaaaaaagctttgaatttgtaagtggtcacagtgggagtttggattcatatcgtttggactatatgaataaaggagagacagtatttcgcttaaatgaagatggatatccagtattcaatgcagatggattagcggaattaagacaagtatggggatcagaagaagtaatggaatatgaaagaccgttgctgtctttaaatactaaaggtatagaacagaaggttactcttccgtcagggcatgttgtaatagcatccctagaaaataatccagagataaagaaacaagtaattaaggatattggcattggatacaagttatcactagatgggcaagtggttcgactacaaccaatttggtatgtaaagcttgttgaagatgaaacaggtaaacagaaaatctatgagtggagtgagggaggactaaatggattgggatcggattaaaaccatatttattgtgaccttttttgttttggacctctttctcattttccaattcattcaaaagcaagatagtaatcaattggagcttattgcagaaacaaagatagatcaagaattaaaagcaaataaaattacgatgggaaatatccctaaagaaccgaaaaaagagtcatttattagagcggaaaataaagcctttaaagaagaagatatacagtctttgaaaaatcaaacggtgcatatacaaaatatgtacaagatagaaagtaagctaaaagagccttttttaaatacgaaatcattatcaaaagataagtataatgaatttttgaagaactatgtattggatggacaaaagtatgaatttggagcggtgaaagactctaaaatttatttcttccaaaaatataaagataagcctattttctataataatcaggcgatgattgttgtggaattaaatgaaaaaaatgaacttgtttcatatacgcagacaatgctaactgatttaaaagaaatgggcgaaggtgaaaaaacgaaagagcaagaaattattacggctcaaacagctttagaaaatttgtatttaaaaaataaaattcatggaaatacgcatgttaaagaagcgcaaattggttatgccactcttaccgcatctacttctaataaccaagtacttgctccaacgtggaatttaaaaacggagcagaagcaggacttctttgtgaatgcaattgaaggacaagttatggaattaggagaaaaggaaaatcgagtggttgatgaacatactggagtgagaaagaatggggttgcattttagcgtacttgcaagtggaagtacaggaaatatgctatacgtaggaaccgatgaaaaaaaattactagtcgacgcaggtttaagtggtaaagcaacagaggctttatttaaacaagcagaactgaatataaatgatgtatcaggtattcttgtaacgcatgagcatagtgatcatattaaaggattaggtgtattggcacgtaaatatgatttgcctgtttatgcgaatgagaaaacatggaatgcaatggaacatttaataggaaatatcccaactgaacaaaagtttcttttctcagttggtgatgtgaaaacatttggtgatattgaagtcgagtcatttggagtttctcatgatgcggcagaaccgatgttttatgctttccataacaataataggaaattagcgcttattacagatacgggatacgtaagtgaccgtatgaagggcgttattaagggagctaatgctttcgtatttgaaagtaatcatgatgtagaaatgcttcgtatgggacgttatccatggagcattaaacgacgtattttaagtgacgttgggcatgtttgtaatgaagatgctgcattagcgatggcagatgtaattacagatgagacaaagcatatttatttagcccatttaagcttagataataacatgaaagaactagcgcgtatgtcagtatcacaagtactagaggaaaaaggatttggagtgggtgaatcctttgaaattcacgatacagatccaaaaatgcctacaaaaattcaatacgtataattcttcattttagtaaacaataaaggtgaatatagttgttttcaggaagataggtgaacaaatatgtcctttattgatgaagaaagttatcgtatgaaacgtgcaggaaaaaagaagcacaaaggtatagttttttctagtatagcgggaacaattgtaggagcttctttatttgcgtttggagcgcctttattttcaaattctgctgatacgcttccgcaagctgaagcaagcggaagtaatatggctgaagctcaagggattaaacagattagctttgtagatgctgttgatcgtgcatctgaagctgttgtgggtgttattaacattcaacgagataacttttcagaggcagattcagaggccggtacaggatcaggagtaatttataaaaagacagatggtcaagcttatattgtaacgaataatcatgttgtagctggagcgaatcgtattgaagtaagtctaagtgatggtaagaaggttcctggaaaagtattaggaaccgatgtagtcacagatttagctgtattagaaatagatgcaaagcatgtgaaaaaaataattgaaattggcgattctaatactgttcgcagaggagagccagtcattgcgattggaaacccacttggactgcaattttctggaacagttacacaaggtattatttcagctactgaacgtattgtccctgtagatttagatcaagatggacattatgattggcaagtagaagtgttacaaacagatgcagcgattaatccggggaatagtggcggtgcgcttgtaaatgcagcaggacaattaattggtattaattcaatgaaaattgctgcaaaagaagtagaaggaatcggccttgctattccggtgactagagctgttccgattatgaatgaacttgagaagtatggaaaagtaagaagaccttatattgggattgaacttaggtcattaaatgaaattccaaactattattggtcaaaaacattacatttaccaggtactgtaacagagggagtttgtattttggatgtgaaaagtccttcgccaggtgcggatgctggtttaagagaacatgatgttattgtggcggtagatggaaaaccgattcgcgatattattggattccgtacggccttatatgataaggaaattaatgataaaatgactcttacgttttatcgtggtacaaaaagagtaacaacaacagtgaaattaggcattcaaaagtattaaaaacaggagggcctacctcctgttttctattgtagaaaagtgaggtgtagaaaatgaatttaccttgttgtttagaacatgttgaattagcgttagatattattgtggatgagtgtgaagtcgcaccagttatcaacaatgtggataacttagaaaaagagaaaaaaacatgtgaattttgtcaaaatgaggcgacatatgttgtatcgaacacagattcccacacaatatgtgggtagcgtttgtggatatgtggataagttttgtggataacatgtttgtaaggtggaggatacgtgtgaatatctcgattatttcaattgggaaattaaaagaaaaatatttgaaacaaggtatagcagaatacttaaaacgattatctgcatacgcaaaagtagaagtgattgaattgcctgatgaaaaggcgccagaaaatttaagtgaagcagaaatgttaattgtaaaggaaaaagaaggtatacgtatactggataaaatttctgatgacacgcatgtgattgcattagctatagaaggaaagcaaaagtcatcagaagaatttgcggtaagtctagatcgccttgctacatacggaaagagtaaagtcgcatttgtaattggtggatcacttggactaagctcagaagtgatgaagcgttcaaatgaatcactttctttttcaaagatgacattaccacaccaattaatgcgattagtgttgcttgagcaagtgtatagagcgtttcggattaatcgtggggaaccgtatcataagtaatgtattctatgtaaaacactgatattatcatatttattttattatgcctataattggaggctatgtgaatggtaagtgatcagatgagatattctagactcgcaaatataacaaaaataataaatacgaaattagaactacgtgacgtattgcagcgtgtgacaatggcgatatcagaggaaattgttaggtgcgatgctgttggaatttatttacctcaggaagatggaacatttagagggtttgcaggaaaaccagagactataaatggcgtaacgcttgatactcaagtaattgatcctgaaatagacttgctggcaaaagaggttattgaaacgaaaaaacccatctatattcctgatacctcaaaggatcatcgaccagatccgagaccggttaatgcattcaaaattaagtccttattagctctgcctatctcatttgggcaagagttatttggtctagtttttttgtttgattatggaattccgatgaacttaacagattcagaaattcaaagtgttgaagcttatgtaaatatggctgcggttgcaattcaaaacgcaaataatttaaaacaaaaggaaaatcttattgctgagaagcagctgttactaaatgttacacgtgatttatcaatgtgttcctcgatacaggagagttttgataaatgctttttttacctagaacagattttagagagtaaaaatatgactgcccatcttctagatccgctaaacaaaacaacaattaaaacaacgaaattaagtaagggctgtcattggacagaagcggattggacagagaaaagctatgaagccaagatccaagaggttattcaaacaaaaaatatagatagtaagggtctattgatgattccattggtttcaatgggagaagtattaggggtaatcgtcgttggcaaagaaggaaaagctcacaattatgatgattcccaacttcaactagcaaaatctatcgttgatgctacagcccctacgttttcgaatttgttatatatggatcaactagaaagcatagtggaagagcgaacgagagagctagctgctgctaatgaaaaagttacaagtgtgattgaatgtattacggatggattttttattttaaataataaatgggaatttacgtacgtaaataagcaccaatattttccgcaaagaaaaacagcaaaagatgtattaggaaagaatatatgggatgttttcccgagtgaaatcgacacagttatgtataaggaatttcatcgtgcgatgtcagagcgaactacagttcattttgaatttctttctactgcagatgaatattggcacgaagttattgcatacccgtatgatgatggtatttgttgtatttttaaaaatataacggaaaaaaagaaatatgaacaggaattgaaaagattatccaacatagatttaatagggcaaatggcagcaggtatcagccatgaaattagaaatccaatgacaacagtactaggatttttacagttattaaaagaagataatgcctatgagaaacataataagtactttcatttaatgattgaagaacttaaccgtgccaattctattattactgaatttctctcaatgggtaatacaaggaaatcggatttgcagatgttagatttaaattcaattatccacgatattattcctttaataaagattgatacgtacaatcaaaataaatatattcaagtcgatacaaatgacattccagaattacttttaaatcgtaatgaaatacggcaattattaatgaatctatatcgtaatggcttagaagcgatgaatacagggaaagttctaaccattagcacttacaaggaaggtcaaaattgtgtggtgcttgcagtgcgggatcaaggaaaaggtatcaggcctgaagtattagagaaactgggtacgccgttttacacgaccaaagataatggaactggattggggttaggtgtatgttatgccattgctgcccgccataatgcaaaaatagaaattcaaacaggatcggaaggcactaccttttttgttaaatttaattatgaaaataataaaaaataaccttatttagaatagttacgatgaaccgtatcataaataaatttattctttgcatataaaaggataaaaagaccattggacaaaaattaccgatggtcttttaaatattattagatggtatgtagatttcctaaaataagtatgtttctatttccataaaaatatgctgtaatatgaagaggaaaaagtataagtagttagagaagtgaggaattaaaggtgaagaagtttaagaagttttacttggagattacgagtgtatgtaatcttgcgtgtagcttttgtccgccgacggaaaggcagaagcaattcatttctgtggaggattttgctaaaagattagaccaaattaaacctcacacagactacatttatttgcacgtgaagggtgagccgttgctccacccgaaaatagatcaactattagacttaagtcatgaaaaagggtttaaagttaatattacaacgaacggaacgttaattaataagagaagacataggctgttaaataagcctgcgttaagacaaatgaatttttcactgcatagttttgatggacatccaggttcgcaagataaagagggctatgtaaggagtatactttccttcattagggaagcgacaagtcaatcagatttaattgtatcgttaaggttatggaatttaactcaggataataaaacgaatgctgaaatccagaaaaatagagagttattatctataattgaaaatgaatttgatctatcttatcaaattgaagagaagcttacaccaggaaaaggtataaaaattgcagaacgtgtctttattaatcaagactatgaattccagtggccagcattacatgaagaagaggatgatgggaaaggattctgtcatggacttcgtaatcaagcgggtattttagcgaatggaacagttattccttgttgtttagatggtgaagggattattaaccttgggaatattaataatgattcattttctaacattatcgaaggtgaaagagcaacaaacattgtcgatggattttcgaaaagagttgcggttgaagaactttgcaggaaatgtggatatcgcaaacggtttgggaagtaaatatgaaataagccctcataaagcgagggcttattttttatacttgataagaatgctctaatttatcaattaatgaaccaacgtaagaaacagctttacggattgcgtctggttttgacatatctactccggcatgtttcattgtaccaccagcgatcaatagcgggttgtccttcctctttaatcatttgagctactgcagtggatgcagtgtgtgctgccttttttgtagtatttctagtaacgatttacggaaaggttcaagttttgtttcttcagttaaatatttttcaattgttccttcgccgaatatgaggatttcattatgaataaaggatagtgcagtatgtactttcgtccataaagcagaaattttggaagagttcgcttgaatacttggatttgtacgatcagtagattcttttaaatttgcatatgagtacagttttgttaacgtcattaaaagttcttcttctaaaagtaggcaatttaataaagtgtgggagctagtatgtaaatgtcctttaaatgaatcaagtttctgtatatcattttccaatgcgtttaatgcagtatgctattcggcatcagaattatacaaatcggataaatcccatgttagttcagcaggtacctctgcgcaattaagacgattttctattacatttttcaagtcgtatatcctccttattaagactatctaaaaatataatgatagaaaattcggttaaattaaaatatttttcatttttatatacaaaaaagaaggacaagcatgaaaatgcttgtccttcaagttaatttaagaattaatatactttgtcaccattgaaaatcgagtttttcacgacaacataatctacagtacgaatagcatctaattttgttccaccagcgtaagagatagaagattgaagatcttgttccatttcgattaacgtatcttctaaagaacctttatgctcaacgaacattttcttaccttcaacgtttttcttctcacccttttggaattcagaagcagaaccgaagtattctttataaagtttgccatctctttcaattgtttcccctggagactcttcgtgaccagcgaatagagaaccgatcatgaccatagttgccccaaatcgtatagatttagctacgtcgccgtgtgtacgaataccaccatcagcgataattggcttacttgcagcttttgcacaccagcgaagtgcagctagctgccaaccaccagttccgaagcctgttttaattttagtaatacaaactttaccaggtccaataccaacttttgttgcatcggcaccagcattttctaattctcttaccgcttctggagttccaacgtttccagcgataacgaagctctctggtaaatgttttttaatatgttgaatcatgttgatcacagcattagaatgaccgtgtgcgatatcaatcgtgatatattcaggtgtcagttgctcagcagctaattgttgtacgaattcatattcgtcctcttttacaccaacgctgatagaagcgattaatccacgtgattgcatatctctaatgaatgagattcgtttctctggttggaaacgatgcatgatataaaagtagttgttctcagctaaataagttgcaattctttcatcaataatcgtttgcatatttgcaggtacgacaggtaatttaaatttatgttttcctaaagtgacagttgtatcacattcagagcggctatttacaatacattttgcaggaattaattgaatatcttcatagtcgaatacgttttccatcatttacacccctaaaatacgaatattttatttttattaattaaaaatgttcgtccataggataatttacattatttttattaagaagtcaaagaatttcttaacattttttgaaaaagtagattttatacctgaaaaacaacgttaaaaacgaatttaaaacgtttttttatttttattgttcgtttatgaaaaaggttgaaaaattaagataattacacaaggttgtatgtattctttttatttttttggagtggatgtaggatactatgaaaaggttaatgctaacaatgcaagcaaaagatgttatcaagtagttgaacaatatatgaaatgaaaaggtttgtttctatataaaaagatgaatctggcatgattcaccttttatgtaaggtttcaagtataataagtagggtgatagtaacgtatacaaaagataaaaaagaaaataatacagaataaaatgaggttaatatatgagtaaaaaaagtttttctgattataaattaagtaaggaaattgtaagggcacttactgggttagggtatgatcatccaacagaagtacaaggtgaggttattccagttgcattacaaaagaaggatcttgttgtgaagtcccagactggaagtggaaaaacagcttcatttggtattccactttgtgaaatggtggagtgggaagagaataaaccacaagcattagttttaacaccaacgagagagcttgcggtacaggtaaaagaagatattacaaatataggtcgattcaaaaggattaaggctgcggcacatgcccatcaacttaagaatttgcactacccccaagtgtcaaaaaacgttattccggtagcgcctgtgttaccttgaacaccttgaggtccagtggcaccagtagcgcctgtgttaccttgaacaccttgaggtccagtaggtccaggaggcccgccagaaggtccagtaggtccggtaactcctataccagtagcacccgtgttaccttgaggtccagtggcaccggtagcgccagtagcgcccgtgttacctcgaggcccagtagcgccggtagcgcccgtgttacctcgaggcccagtggcaccagtagcgcctgctggtccagtaggtccggtaggtccttgaatgaacgaagcagaattaactagagcagtttgtaatgctgctattaatttaaggagctcttgaagtgtgcaagggtcaattcggaataattttgtaatgtatagtaaatagttaatgagattttgaagctcaataaatacagcgcttgctacaaaggttggatttcttaatatagttattaagtttttaataatagctaacccttgtgctttcagggaggaagtagcgtctagtgaacaaataaatttactcagtaggttcaatgtatcgattaggtcttcaatattttggggagatggatttgcgaaaagttttgggattatttttgttaaatcaataataatcgcacgaaatgttctaagttgagctttagtaattgggattgatggagtattcgggattcgtccggcgctacttggaaagcatggtttggagaatttgttttgattgtcgttataacgagacattaaatctctcctttctcacgaaaatgtgaacgaaactcatcatagtagatgcagaaattagttaaatggtcatagtaaaatcgtttgtttaaagaaaaaatagaaaaaacgccttacaataaggcgttttttctattttctgcgtattgataatatcgctttaaggaaatttttgatttgaatccagcgagttttataatttctgattcaggagtttctttttttattaagtttaaaatataggtgttacgaaaatgttgtcctgaaattcctttacgtaaattggctctagccacttcgaggcgaatcattttttgtatagcaatttccgttaatgcctttggtgcatcattttcatatacccacctgtatgttccacggttaaaatcgaatgcgacaaataatggatcatcactatggtatttaggacgaactggttctgggatgcttttgtaataattatatagttgttttttgtcttcttttgctaatgtaattgttctttctacacctgcggttgctgggattgataatgtattagtttcaaagtgaacgtgatgcattgttaatgctgtaagttcctgtaaggataaaccgtagtcaatcaatagatttaaaatagcaatattgcgatccattaataaggggcgcacaggaagttgtttttctgaaagtccttctaatgaagtgactatatactttaaccttttttcttcatcaggtgaaatgaaatcttcgttacgaagtgtacggtctggttgaatagatatttccatattcttcaatggattaggaatgtttagaaaatgatgcattctatttagtacaataaatacacgatgcatcgttttttctgagtaatgtcgattcgtttttaaatcggaaaagtaatcttcgtagtcttttgtacaaagtgtagcccatatattactggaagggagctttttgtttttttctaaccaatgtccgaagtcttcaatgtcataaacataacgtttaatagttgagggttttcggcctttattcaataaaaaaatagaaaaggcttgtattgtatcatggaattccgttgtctccatagtcccaccaccttaattatttcttatattatagcaaacttttctgaaaataggcatttacaagggggacaggaataataatatttggtgagtggataaaatgaggtgattgtatggaacaatcgatgcgaaagaaaaacaacaatcaaattaatattgtgttaaaccatcgaaagaaaatttctttgccagccgcagaaaataaaacggtaatttcaaatgaaactgcaattaaacatgaaatgctgcagagaattgaagaagagatggggaagcttgttgggatggaggatataaaaaagataataaaagaaatatatgcttggatttatgtgaataaaaaaagacaagaaaagggattgaagtcagagaagcaagtacttcatatgctgtttaaagggaatccaggtacagggaagacaactgttgctagaatgataggaaaattgctgtttgagatgaatattctatcgaaaggccacttggttgaagctgaacgtgctgatcttgtaggagagtacatcggccatacagcccaaaaaacaagagatttaataaaaaaagcaatgggaggtattttgtttattgatgaggcgtattctttagctcgaggaggagagaaggactttggaaaagaagcaattgatacgcttgtaaaacatatggaagataaacaacatggttttgtattgattttagctggatattcaagagagatgaatcactttctttcattaaatccagggcttcaatctcgttttccatttattattgagtttgcggattactcggtaaatcagctattggaaattgggaagagaatgtatgaagatcgtgaatatcagttatcaaaagaagctgaatggaaatttagggatcatttacatgcggtgaagtattcgtcgcaaattacatcgtttagtaatgggcgatatgtacggaatattgttgaaaaatcaattcgtacacaggcgatgcggttgttgcaagaagatgcgtatgataaaaatgatttaattggaatatcgagtatggatttgatgctcgaagaggagacgcacagtacataaactgtgcgtcaatttttgtgtataagttcgtttactctttttttgctttttcttggtgtgttttatggaagtgttccattttagcgctcttttcgtgtgctgaattaggatcgtgtccaaattgatttactgagcttttttgagctcctttattaacgtggtttgtcatttgtattcacctcactttaaaaattagtataaacattatataaagaaaaaatcgttagaaaagaaaaacctctttacgatatgtaaagaggttagattgctatttatgcattgaacgttctttcgtttcgatacgtctgtgcggtaaatgccatttgtaatgaatagaaaccatgcggaagcaaacaattaaaatgaatagaatgtaaagagcccaatcgctaacaataatttgagctccaattaagaaacctgctaaaattgtccaaaaggcatatacttcagctcgaagaacgagaggttttctgcgggctaaaagatcgcgaatgataccgccgccgataccagttaaaacagctgctacaattgtggcgctaattggtaaatttaatttttgggcatataatgctccttgtacagcaaatgccgataagccgatagcgtcagtgatattttcccactttttccaatgtctaattaacttatttggaaaaagaaaaataatagtcattgataaaagtgcgatttggaataacatgtcttgttgccaaaacgcgacaatcggataaccgattaataaattacgaagggcacctcccccaaatgcggttgccattcctaaaatatacaccccgaaaatatcataatcctcttccattgcaacaatggctccgcttagtgcgaaagcgattgtgcctatgatgctaaaaatctcccatgccatgaattttctcccccgctaactagatgaaatgtgcttcctctgctattatattagaaggtttaaatttcgaaaaggatgagtgaacatatttgatggaagaaaaagaaaaagtcatattagtaggctgtcaattgccacaagatgatgatgaaaaatttatgcattccatgaaagagcttgcatcactagcgaagactgcacgagcagaattgttagtgtcaacaacgcaaaaacgaccaaagtttcatccggcaacttacataggtaaagggaaattagaagagcttacaatgttaactgaagagttagagccggatgttattgtatttaataatgaattaacgccgagtcaaattcggaatttatcctcagtattagatgcgagagtaattgatcgaacgcaactaatactggatatttttgcgcaacgtgcgaagtcgagggaaggtaagcttcaagtagaattagctcagttgcaatatacaatgccgcgtcttatggggcaaggattgtccttatcgcgtcttggtggtggtattggaacaagaggaccgggtgagacgaaattagagacggatcgtcgtcatattcgatcgcgtattgatgaaataaagaaacaacttgcagttgttgtggaacatcgaaaaagatatcgtgagagaagaaaagataataaagtatttcaagtgtcattaatagggtatacaaatgcagggaaatcgacactgtttaatagattaacggaagctgatacgtttgaagaaaaccttctgtttgcaacattagacccaacgacaaggaagatgccgttaccttctggttatacagtattactaactgatactgttggttttatacaaggtttacctacttcattaatcgctgcttttcgttcaacactggaagaagcgggggaagcagatgtcattttacatgtagttgattccgcggatcctaactacatagggcatgaaaaaacagtaaaaagattattatcagaacttgaaattaaccatattcctgttattacgttatataataaaaaagatgaattacatcaaaactttattccgtttccgaaaagtgatttcttaatgactagtgcttttgaaaaaagtgatttattgcgtataaaagaagcgatagaaacgaagatgaagaaagaaatggatcgttatcgagtggaaatccctccgagtgaaggtaagttgttaacgcttttaaagacggaaactctattagcaaagatggagtttctagaagataaatttgtatatgattgtgcagggtatatttttactcattcgtcgcttaatgtgcaattaaagagatttttagtggaagaaggagaaaataaaaatgtttgatcgtttgaaaaatggagaaaaaattgctccaatcgtaaaagaagtagagagtcagattacagaagtacataaacgtgcggatgaagtaattgaaagcaatcagtttcgtgtattagaaagttttcgtaaacataaaattagtgactcgcattttatcccgacaacaggttatggttatgatgatattggccgtgatacgttagaaaaagtgtatgctgatgtatttggggcggaagctggacttgttcgtccgcaaattatttcaggtactcacgctatctctacagcgttatttggtattttacgcccgggagatgagttattgtatatcactgggaaaccgtatgatacgttagaggaaattgttggtgtgcgtgggaaaggtgtaggttcatttaaagaatataatatcggttacaatgcagttccgctaactgaagctgggcttgttgattttgaggctgttgcagcagcgattcataataatacgaaaatgatcggtattcagcgctcgaaaggttatgctactcgtccatcgtttactatttctcaaattaaagagatgatcgcgtttgttaaagaaattaaacctgatgttgttgtgtttgtagataactgttatggcgagtttattgaagagcaagagccatgtcatgttggtgcagatttaatggcgggttcgcttattaaaaacccgggcggcggaattgttaaaactggtggttatattgtcgggaaagaacagtatgttgaagcgtgtgcatatcgtttaacatctccgggaattggcgcggaagctggagcgtctttatacagtctgcaagaaatgtatcaagggttcttcttagcgccacatgttgcaggacaagcgctgaaaggtgcaatttttacagctgcgtttttagaaaagttaggaatgaacacgtcaccagcgtggaatgcaccaagaacagacttaattcaatctgttcaatttgacgataaagaccgtatgattgccttctgccaagcgattcaatatgcatctccaattaattcgcattttactccgtatgcaaactatatgccaggctatgaagatgatgtaattatggctgcgggaacatttattcaaggtgcaagtattgaattgtctgctgatggtccaattcgtccgccttatgttgcttacgtccaaggtgggttaacttattcacatgtgaagattgcgatttgttctgcaattgatgcattaattgaaaaagaattattaacaatttcttaaggggaagctgtcgatttcggcagcttttttcgtataaaagtaatgatttatgcgattagaaaaagaatgaaaaaattcataaaaaaaattataaaaaatcatgtaagaaaagctaacatctattgacactaaacataacatagtataaaatgagaagcagttaaggcgaaggaggaactgaaaaatgaaagaagatagacgttctgccccgctgtttcctattggtattgttatggatttaacacaattgtctgcacgtcaaattcgctactatgaagagcataatcttgtttctccaacccgtacaaaggggaatcgtagattattttcatttaacgatgtagataagttgttagaaattaaagatttgttagatcaaggcttgaatatggctggtattaaacaagtgttactaatgaaagaaaatcaaacagaagcagtgaaagtaaaagaagaaacgaaagaaatttcaaaaactgagcttcgcaaaatacttcgagatgaactacaacatacaggtagattcaatcgaacttcattgcgacaaggtgacatttcaagattttttcactaaagataactgattctgaaggcgattagagggactaaggaggaatttataatgtctagatacacaaaagaagatattttccgtttggcgaaagaagagaatgtaaagtatatccgtttacaatttacggaccttttaggggtaattaaaaacgtagagattccagtgagacaattaacgaaagctcttgataacaaaatgatgtttgatggatcttcgattgaaggtttcgtacgtattgaagaatctgatatgtatttatatcctgatttagacacttgggtaattttcccttggacagctgaaaaaggtaaagtagctcgactaatctgtgatatttacaatgcagatggcactccatttgatggagacccacgtaacaacttaaaacgtgtgttaaaagaaatggaagctttaggattttcagacttcaatcttggaccagagccagaattcttcctatttaaggttgatgaaaaaggaaatccaacattagaactaaacgataacggtggatacttcgaccttgcgccgatggatctaggggaaaactgtcgtcgtgatatcgttcttgaacttgaagaaatgggatttgaaattgaagcatctcaccatgaggttgctccagggcagcacgaaattgactttaaatatgcaaatgcaattcgctcatgtgatgacattcaaacattcaaacttgttgtaaaaacaattgctcgtaaacatggtttacacgcaacgtttatgccaaaaccactatacggtgtgaacggttcaggtatgcactgtaacttatcattatttaaaaatggtgagaacgtattctttgatgcaaacggtgacttacaattaagtgatgatgctcgtcacttcatcgcaggtattttaaaacatgcaccagcatttacagcgatagcaaacccaactgtaaactcatacaaacgtctagtgcctggatatgaagcgccttgttacgtagcatggtctgcacaaaaccgtagtccgttagtacgtatccctgcatctcgtggtattagtacacgcgtagaagtacgtagtgttgacccagctgcaaacccatatttagtaatggctacattattagctgcaggtcttgatggaattaaaaacaaattaactccaccagcagcagtagatcgtaacatctatgtaatgacaaaagaagagcgcgaagaagcaggtatcgttgacttaccagcaacattagcgcaagcattagttacattacaatctaatgaagtagtatgcggtgcactaggagaacacttacttgagcacttcatcgaagcgaaagagattgagtgggatatatttagaacacaagttcaccaatgggaacgcgatcaatatatgtctctatactaagaggcttgaacccttgatacaactcgtatcaagggttttttaattcccaattattacacttttatgtggttgcaaaatgaaaaaagccacataaaagccacgaattaataacaagtagtgatatcatagaaaaacattatcagataaacgtaagttttatataatttgtgaaatgaaaaagccttgatactacggtatcagggcttttttagtgaagttattggatatattaactactaggcaatggattatttttggttattttgaatcatgttactaagaaaatcttttcaaaagaattgattttatctttttttaaatcacttgtgctataacttaataattctttactgcttgtacaacgcgaccaatgatttttacgtcctcatctgcaaggctgtaagtttgtggcttgtgaatcgaatcattactcaatgatattaacgtaatgctgcttagttataacatagtcttattcaggatttcgttagttcattttctaaattttggaaataaatatagcttagtaccttgcaataaacaataccgagtggtatattatggataagataggtactgtgcattgaacagtactaagataggaaaggaggatggcacttgaacgttcagtttaaaaaaggtgtgcttgaactttgtgtattagcacttgtaaaacgtaaagatagttacggttatgaacttgttcagcaaatttctaataaatttttaatatcggaagggtcagtataccctttattacgtcgtttgacgaaagaagggtattttcaaacgtatttaaaggaatctacggaagggccacctcgtaaatattatcaattaacagagcaaggggagacgcaatttcatttgttagtaacagaatggtgtgattttgcgaaaggggtacaagaaattattgaaggggtggaatgggatgagtaaagaagggtttcttaaagaattatcaagttatcttagaaagttaccagaggaagagaggcaagatattttattggattatgaagagcactttcagtttggactagaagaggggaaaactgaatcagaaataatacaaggccttggttctccgaaagtaatagcgaaagaattacttgcgatgtatcgcttcgatgaaatgaaaaaaaatccatcgacttcaaatgtgacaagagctgttatggcagcgattggacttagtttgtttaattttattattgtgttaggaccgttagtcgcaattattgcttttatattttctttttggatcggtggtattgctagtgtagtaacaccatttttcgttattggaaaagtatttatgggtacttttatatggttggatcttttcgttagtataacgtttgttggagtaggtttattgttatgtattatcgctttttatagtacaaagtggtttaagagattgtgtgtacgatatgtaatatggaacttcaaaatgataaaaggagagtaaatgatgaaaaaactatttttaatcgctattgcttgtatcattattggagtaataggaatttcccaaacatatgaaaaagcagtacaaactgctaaaaaaggcgataaagaaaatgtaattaaaaacgaaacattaaaaaatatagaagttaagttagatgccggggatattattgtccaaaaatctcctgactcttctttttatatcaagcaatcaggagatgtacgtaaacaagagattcgtatcgcagaagatggtgacacattaaaagttattggggaaagagaaaaaggtgcttcatttgatttttctttttacgattttaggtttcaaacgtctaaattgactctccttgtgcccgaacgctcttaccaagatgtaaaagtaaattcatctgctggacaaatcgagatgagtgatgtgaaaagtgatagcgtaagtgttagaacacttgctggagaagtagagttgaaacaaataacggctaagaatgtggagggatcgacaaaagctggtgaggtgaattttaagaaggtattagggaaagtgaccgcaaaaacaacaagtggggaaataaatattcaagatcatgattctaagtataatctagaagcaagttcaactgcgggagatatagatattactttatcggaaaaaccacaagatgcggtaattactgggcaaagtgctgccggagatgtaacgatttttaatgaagaaaataaaaacgtaacaattggaaatggtagtaaaaagattagtggtaaaacggctgctggagatgtgacgattaaaactcgttaataagaaatagaatgcatggaaatctatcaaaatacaaaaaagaagataattaccgtatataaataaggtaattatcttctttttattattttttaatgtaaatcacgatatacgccaattactttcccgataactgacacttgttttaaaatgataggttctaatgaagaattttctggttgtaaacggaaatggtctttttctttatagaaacgtttaacagttgcttcattatcttctgttaaagcgactacaatttcaccattatatgcagactgttgttggcgaacaacaactaaatctccatcgaaaataccagcttcaatcatactatctccagaaatacgtaacatgaacacttggtctgctccagcaacaatactagctggaagtgggaaatgttcctctacgctttcgaccgctgtaattggtaaaccagcagtaacttttccgacaattggaacttgaataacagattgtgtttccgtatccattcggtcttcacctaaaatttcaatggcacgtggttttgttggatcgcgtcgaatgtatcctttttcttctaatcgtgataaatgtccgtgcactgtagaactagaagcgaggccgactgcttgaccaatttcacgtacggaaggtggatatcctttttcttgtacttttagcttaataaagtcgagaatgtcttgctggcgtttcgttaacttttccattttttctaacacctcgttttctttcatttttcttattaataagtataacatgtgaaaaaacattctacaaacataagttcgaacaaatggcggatttatgttacactatagggaaataatagggagaaagaggggttcaaaatgaatgcaattatttatgcacgtgtgagtacaacgaaagaagcacaagaaacatcattattacgtcaaaaagatgaattattgcatttagctgagcgctatcaaatgaatgttactaaggtgattgaagagcaggctagtggatatacaattgaacgtgacggtatattagaggtgttggatacaattcgagacgaacaaattgatgtgttacttatacaagatgaaacgcgtcttggtagaggaaatgcgaagatcgcgttaatgcattgtttacataaagaaggcataaaagtatatacgcatacacataacggtgaattacaattgtcggattctgattcgatggtattagatattattggtattgttgaagaatatcaaagaaagattcataatatgaaaattaaacgaggtatgcaacgtgcagtagaaaaaggttatcgtccagaaaaaaatttaaaaaatcgtcatttaagtgtaggaagagagaaaaaagaagtgccaattgaggaaattgtacgtttgcgaaaaagtgaactcacgtttgaagaaattgcagcaacattacgtggatttggtcataatgtttcaaaggcgactgtacatcgtagatatgtagagtatacgaagcaattgcttgataaagaagagtaactattgtatgataataatcagttttgattagaagggggattcgagatgattaatcacgaactcgttgaacgcattaacttcttagcgaaaaaagcaaaagctgaaggtttaactgaagaagagcaacgtgagcgtcaatcgctacgtgaacaatatttaaaaggatttcgtcaaaatatgttaaacgaacttaaaggtattaaagttgttaacgaagaaggtacagatgttacaccgacgaaattaaaagctttaaaaaagcaagataatgcaaaattaaattaaaagatgggcgaagcccatcttttttatttgtaaaaatcgttatttaataactttccagttgttattaactgttgcttctatcgttttatgttccaatatataattagcgataagttcagacatatctgtgggtatatcttttactactggtttgttttgaaacataaagaaatttcccccgccacttgcacgataattattcattacaacgtcatattcttcattcatattaagaggagcactgttatgctgtaaagattctactctttcaccaattggttttgaaatgtttaatacgtatgaaatcccttcccacatatcataattataatgttgtggctttggttctatgtaggtaggacttatggtgattgatccatctgtttttaatgtgaaataagaagcagagagttcaagagcattttttatatctgctccagttattttaattacttttaatgtgtttggataaatataattagaaacgatatcacgcattgttacatgttccgggaaacctggagatgtattatggaacaaacttgtacaagaaattgatacattagctatattcatctgtattttatttatgaattctataaaaggatgatcatgcaaacgagtttgcatagcatctgaaatttgcatgtccccttgaatgattccaataggttgatcaagccacttttgtgttttcttttcgtaatcggctaccaatgaaagtacatcttggtccgcctcaaatccttgtacagataataattcagaagaactctcttttttcacccatttatgtttcgttttttcgaatgttacttttacttttccaactgagtgtccattgcatccggtctgtaaaattgttacaccgttagccattgtgtgagaaatttcccggtgttggtggcctgttaataagatatctatgccttcaatttcatggcacattgcatatccttggttttctcctgttaacacttcagtcggtaccccggtttgtaaatctcgttcaactcccccgtgatacgctacgactagtaaatctggtttctcatgttcgcgaatataagaaacccattcttttgtagtctttaatgcatcttcaaatagtaaatctttaatgtgatgggactgttcccaatttggtatgtaatgtgttgttaccccatgcccatcaacttaaggatagaaactctacggttttccattaattgaaatggctgttttttgaatgtttggcttcgctgtatctaaccagtaatttgcattgattcgtgacagttcctgattcaggtggatatttttgattaattctcctcctcctgaacctaaatcaatgttggataaatttacattcggttgcttaatcatagtttttgcgtacaaatccattacaagaatatgagagcctgtttcagccaacgctttctttaatccttcaggtcctaacgcataattttctattttctgttcttgagctgtctgttcttgtgcaagtgcatgaatagtactaccatttgtagcggttataatcgttgctaaagtagctaaggttataactttaaatggaaatttcatcatttgattctcctccttattttccgtttcgttataattttttaataaacctaatttcttaatatcaaaatttataaacttgttcttcaagttgaattgttacactttttaatcgtcttaatatatctttttgagcctgagtattattggtatcaacttcagtcgataattttgtaatactattatttattagatccaaatcctctttgtaacgtttcattagctcaatttctccatctacttggttagcaaatgtatgcaaatcattttgcatgaaaagaatcattgatttttgtaaatctgctactgttaatttagttgttaagtcatataatttctgattttgtttctctaaatcatttaaatatgctctttgctcagctgttagtttattaatttcagcaaaagtattatatgttttttttattttttcaggatcaatcactttcataagatcatactctttcgtttttgtaactgcagctgcagcgatttcaccttttttacttttctctatcgcttcacgtgcttcttttttggcagcctcaatttctatagctgattttcctttttcttttgcttcttgctctgctttattctctgcgtctacaatagcattgtttatttcttttcctttgttatacgctactactgctgtttgagcagccggttcaatgatatcttttgatagactataaatttcttggaatacctttagtccttgttcatttaaagctcctggtaataacgctatttgctgtaaatcattttgaattgatttttttgtatctagcatttcattttttaacttatctatttttcctgttccctctgaattaaggacactttgtgcttttaccacatcagtatcaaggtttttcaacttcttatctaccagtaattttaaatctgttaactcattaatttgacgttgcacactttcttgatttgttatagtcatgtcttgaagaacttccagtctatctgtaaacccttctttatcttccttattatctacaaatccttttaatgttggataataactattaaatttagttacaaatcctttactttttgaatttaatagaattaatttaggataaagttcggatgaccactctttcatatcttgtttaattagaaattgagttgtatttaaagatggaatttcttcaaattgtacgttcggacttgctaaagctccatcgataaaggtttgtgttaacttggagtgtgcacctatttttcgtaatgctgaggaaatatctacattatcttgttttgtttctgcctgaacgattggcgttgctagagtattgataggaaaagtcgccccggtaacaattgatgttattaaaaatcctgtcataattttattcttcattccttacacctcttcactattgttttttacaagttttagtcgtaaatgttgtacaacctaacgttaggatttcttcacacacacttgcggatagaagtttttttgaaagagtaattgcatctcgttttttatttatttttgatagaatataaggtccttacttcccccccattttaatcactatgcttttcataagtaaactagaaaatcgcatatcttatgtttgatttttccgacattaaatattttgtttttttctaattatattaaaaaaatttccatactattatcacttcatgaagtgaaataattttactactataattaaacataaaatttgttggtatcattaattcttaataaatatcatgcaaaaaaatgttttcactataactttatgggattttatgtattatgtactttatatgaatatgtacaattgcatactcatatactctccttcaataacatacaaggtagtcactatacattcctatcaatttaagtttttttactcctccaagtgtaaaaaagtttttatttctaaaatttaactagaaaagatgatgttttttatagtttgttcgaactggagaatacaaccaaattaatctagataatatagtgaagaagctttttctcagaaagaaggaactgattctaaaaatgaaataactttattgctacttaacatttccttaatcggccttttagttcagatcttcttttcactataaaaacatcccttttgataaaaaggttccaaggaacaaaacatcgcaatttttttaaaacattacacctcttttgtaagcaatgtgactttatttaaaaagcgacattaaaaatttttttcaaaacctagaagtaacagtttgtccaaaacaaaaacaaccataagtttgccggtccggaaaacttatgattcatatcacacttattcttaaaattattcattcaaatcttctacttatattattttttcaagctctattacttttaaacaaattagaattccattttcatgtagaaacatataattttctttctgcttttttgtagaattgaaagtctaataatccttgaatctacggatattttttctaatatttatgattttctacgctctaacattaaatcttcccttttgagggtaagtctatttcctatttttgataacctataaaagttttatctttatttctttttaatatatacgatatatatttataatagattttatcgattctggaacgtgattgattttgtcctaatcaagttaaacttttttactgaaacaagatataaatcgtcagttttaactatatagttgagaaggaatggcataaaaaaggaggaaaataataatgaaatatcaaacaatattttcatcgttaaaaaaatcctgttttatcttaatactctctttcattatattaattcttgcacttccagcaccaacttttgcacaatccaataacaatgttacatctggaacagattactatgtatctccggcaggaagtgacctcaacactggcacattagatcaacctttcgctaccattcaaaaagctgctgacgtcgccacagaaggaagcacaatctacataagaagcggagtttataaccaaaaagtacatgtaactcattcaggaatctcagaagcaccgattacttttcaaaattaccagaatgaaaaggtaattctagatggctctaaagtcaagttagaggatgatggattatttaccatagaagataaaaattatattcaggtaaacgggttagaatttcgcaatttaaaatcaacgaaagttagcgaaacccctattggtatttatattaccggaacagggagtaatatcgagattagaaataattatatccatcacattgaaacgaatgtaaagaatggaaacgcacacggtattgctgtctatggtacttcatctagtgcacaaaataatttaaatcatattgtcatcgataataacgaagtagcaaatttgaaattaggactaagtgaagcaattgctgtgaatgggaatgttgattcttttggagttaccaataacaaggtgcatgataacaacaacatcggaattgttctgattggacatgaaggagtatctccagtagctgctttagatcaagcacggaatggaattgttcgtaacaatatcgtccatcacaattcatctttcaataatactagttataacgaatattcagctgatggtatttacgtggatggtgggaaggaaattattattgagcaaaatcagagctatgaaaacgacctcggtattgaagtagctagcgaacatgcggggaaaagtgcaagtcaaattacagttagagataatacaatatctaacaatactatgggtggcattgcaattggtggatatgacagtcagcaaggatacgctgaaaataacacgattaccaacaatttgatttataaaaatgacacaaaagatcaagagagtggtcaaattgaattaaattacgatcttcgtaacaatgtgattaccaataacgaaatctatgcaagtaatagtcgtatttttattagcaataattttaataaaaacactggaaacaaactcgattacaatcattactatggtgaattcgatcaaactaatggcttatggcaatggaaaagaaaaatgtataaaggattttcttcttatcaagcaggtatgaaccaagaaggaaatgaacaacatagtgtatttagcaaattaccctcttcattcaaactaatacagtagtctaatactaaattagtattacgttataaaaaagtacatgcaataggcactttaagaatactaataaatttaaccttattaaaacaaaaagagatgccctagtaccatacctagggcatctctttcattttattataaataatcttaatttctagaccttatacatccctaacaaattaacaattatccactatattttctacttaaaacatagtattattattagctgcttcacttggaatctcttgaattacatcccagtgctcgacaatctttccatccttgttacgaaatataccgactatagcaactcccttatcttgagaattagtacgacaatgtacatgaagagcaactgtatccccttcagctactacacgtttaatctctgcagaggaattaggatttttaacaaaatcctccttaaagaaatccatgaaggcttttcgtccatcagcaacaaaaggattatgttacttatactcttcacctacatatttttagtaaaaaactcatagttgaatttaatgtatctaattccttttattatcagaataagcctttacaacaactatttattattttttatttcattaattctgtaatttctttaatacacttaccattatccattgttatatctaatttctatttaaaacccttctttgtacgtttatacctatatatcgtgttaaattgtgtgtggcaagataaaataagctgttaaatttaattattgttaggtagtttctacagtatgatattatcacacaattagttatacatataaaaaaggtttcttgccttgtaacaggaaaccttttatgtattattaacctacaaatctaaaatttcaacaatctgacgtgccttagcattatctatataataatgcatctctaatcctcttctttctgattgaagtacggttcccctcaattttgataaatgttgtgaaacagtggattgggggagtcttaatatttccgttaactgtgtaacattgcatactttatggtgcattaattcatttacaatttgtaatcgaacaggatgtgccattacttttaatacatctacatcgtcttcgtggatttcagatagatttctttcagatattaatgttatcattttgcattctcatttattattaatttctattttccagttatccttataattaatacttatagctaattaccatttgtcctgttgagaaaatatattctctttttaaaacaaaaaggacaccgattaattaaaacgttttttaccgctttaattaattggtgtcctctaattttttgaacaaaatatatcttattttaaaggatattttcaattcttttttctcacgtctagtaaaattttatattttctttaaaattcatattaagaatattcttcaaatcctgaaagcacaagtttgcggcaaacttatgcttcatatcacattccacaccaatcaagctaattaacactatcaatgtagtgctaactatcttaattgaatattagtaataatgagtttaaatattatcaattaactttatattacatgtatgtaaaaacaatgacatgataagctttttcaaatttttctccttgtaaatatttgaaaatagtatttcaatactctccttactgttaatatgcctagaaaaagaaccccatagggttctttttctgttcattccctaaaaatctcatattaataaaaaagaagagggatatatcctctcttcaccaatacaatcgaacatctttatacttaaggaagggcatacattcatcaagagatgaaatgaacaataatagttcacctagtgaattataacacaaatccaattccattaatagataatattaacatttataggataattgtgacagaattgttaagcatcttaatattaaaaggttttatatgtatgtaaattgaaagtggatagtgtaagaataaaatataaggaggatataccatgtttaacaaaaaacaaacattcgtaacaacggtaacaactttaacactaggatgtggacttacattcggattaacaccggcctttgcagattctaacaagatttccgccaataatattcctgttcatactattcagaaccaagaacaagaaccttttactggatatgtcatttcagtagagaacaattatttagtagttgcagctacgcctacaaaagatgaagctcttgcttatcaacatgattggtgggatctagtttctcaaaataagattttaagagttcctgtttcagatgatgaaaactacacattaggtgagaaattaaatgtatatgcagctgcatggactaaatccctaccaccaatagctgttatgcctacaattgaaaaagtatttcaataggtaatatttccaataattaagctatcccatataaaaaggagtcgaataacgactcctttttatattctacattcccttggattccttaccttctcgtacccctaatatttaataacatgcttctttctccctagctaaagatgatatagaggttatgtcactcgcttctttcctttcttctatggaagtagctattatactagtcgagtatcaaacatcatcattattttatagaacaaataagacatcttcttaattcatgctctaattaaaaaagagatctaatacatatctctttataaaacatatttaaaaataaaaaccaaaggacaacaagcatatctcttttgttgtcctttagtttttatcgttgcctattccatattgtactaaattttttattttactctattatagaatgagaataaagtttgattaaaacatcaatctgacttaatttttttcctaccaaactaaattatgctgtaaattccttatccatttagaatatagtatttagtaattcttgttctggactgaattttttagtattatagccatcgattaaacttccttatgtatattctctttataaattgagtaactaaagcatacattgttaaaattcccaataaccacagaaaataataaaatggaagtggggttaaaccaatttgagtacttaaactggtaaatggaagggaaatccctataaacataaccaagcctgtaagcatcaaaactggcctagcagccgtactttgtaggaaagggatatgttgagtacgaatcatatgcacaattaataattgtgttaataaccctactacgaaccaacccgtttgaaataaggattgcatctcaggaatatttgcaccaaatacattccacattacgataaaaatgattatatcaaaaacactacttaccggcccaataaaaataataaaacgaaataaatcttttgtatcccaacttcttggttttattaaaaattcattgtctactttatcccacggaattgaaagttgggatagattatatagtaagttttgacataatatttgaattggtagcattggaagaaaaggaagaaatgcactagcaattaataaacttaatacatttccaaaatttgaacttgctgtcatcttaatatacttcagtatatttccaaacgttgtccgtccttccactatagcatcttctaaaacatgtaagtctttttctataagtataatatctgaactctctttaacaatatcatctgctgtatggatagatacaccaacgtcagactgttttaaggcaaacacatcgttaattccatcccctataaacccgactgtatgaccattcatttgaagtgcctttataatacggaatttttgactaggatttaattttgcaaacacacttgttttacttgcaagttttcctaataccttatcaggaagactatcaatttcataacccagtactggttctcctatatacaagcccattttcctacatacatttcttgtcacggactcgttatcacctgttaaaattttcacttgtactcctttcttttgtagagtatgaagtgcagcgatagccgattgtttgggtggatttaaaaaacctacatatccaacgagtatcatatctgattcatcatttatagaataacttcccactttatcactatttaattgtttatatgcaactgcaacaactcgcatcccctgctcttgccagagttcaattaggtgtttatttctacgctggatttcatctgtaataggaattatcttattattttcttttataaaactacaaattgatacaacttctctaactgcacctttacaaagcattattcgttcgttagcatttttttctataacaactgaaactcttcttctatcaaaatcaaatagacattcatctattttggagtattgagacaaatcatatttactactatcttttacataacgtataactgataaatcaatttcatttttattatttgtatggaagtaactatttatatacgctaatcttaaaacctcatccgacttctctccatttgtatctgtatggcgtaccagatccatcttattttctgtcaacgtgcctgttttgtcggtacagagaatatcaatagctccaaggttatgaatagaagatagttgttttacaagtaccttttttttactcatattaatagagcctttagctaaattagctgttacaatcattggaagcatttctggagtgagtccaattgctatagcaattgcaaataaaaaagcctcataccaatttccattaatacccccatggattatcatgacaataggagtcatgatgatcataaatttaattaatagccaactaactttgcttacccctttatcgaatttagaatcagatttcttgttcatcttaacctgattctttgctattgaaccaaagtaagtatctgttccagtacctacaactattacttttgctgtaccacttataatatgagttcccataaaacagagattttctaattcaattaaattttggatttttctaattttacgttttttgtacatatggaaatactgatttgatttttcaacgggtaatgcttctcctgttagagatgattgatttacaagtaaattttctgatgagataatccgtacatctgcaggcacaatatttccagcagataattctataatatcccctggtacaagatcctcaagaccaatttgtaactttccactttcctccaataaagttctcttattttctttataaggaatatttcccttcctgagaacagttaccttttcatatacaagattttttaatctttctatagacttctgagaacgaatttcttgtatgaaccgaattaatacgcttaacgtcaccatgattcccacaataatagtaccttttatatcattggtaaaaaaagataacattcctaatataattagaagagaaataaacggacttctaaaagaattaaataatgttatataccattttattcttttttgagaaactactttattttctccatacacttcaagcctcttagtagcttcctcgtgagacagcccttgagacgttgttttaaaaaaatctaacgttgatttaacatcactttttgcaatttcaattagcatattataatttttgcttaatacttcctgtttataaaaatattttttattagatctcaacaaatttacctcctatccaaataaatagaattcccctgttttaaaaaaataattataaaactacatttttataattactctgaattttcaattaaattcagaagttcaatagcacttaaatagtattattctcaccataaatagtaatttttatttataagttccctcttattagcaacaaaaaactactatagccataattttcaactgcaacaattgagctagcactatacataatcaaaattccaaatacaattgtaatgataagcgaaaacaccaacggatattccagtaacttgaatacttttttcatttctattctctctttctctatacttccaacgagtttgtctacaaactttgcgggaacgaacttaggtataaaaaaaacttaatataagtttcttataaccctagtaacatttttgcaatggtaaagtacagaattaaccccgttccatcgactaatgtcgtaatgaacggacctgagataacagctggatccagctttaacttatttaaaatcaagggtaatacagatgaaacaatggacgaccaaataacaatgaacaatccagtaatagctacaacttgcgcgacttctgtacctacgcctaaagtgtacgcacgaattaatgctgccacggctaatgtaagccctagtaaaaggcctactaatgcttcttttttcataacacgaaatatatctttaaatttcacctcatttagagctacagctcgaaccaatgtagttacgacctgtgtacctgtatttccaccagttccaattaacaacggaataaagaaagccagtgcaactacatgagttaatgtttcttcataatgccgaagtacagaaccagtatatgcttctgctacaaacagaagtaataaccaacctatacgtttacggtatatttgccaaatagaagtttcgaaatatggcttatctaatggggtgctccctcctaatttttgaatatcttcagttgcttcttcttcgaaaacatccattgcatcatcgaaggttataatacctatcatccgattatccatcgttgttacaggtatagcggataaatcataatccattagtttttgtacggcttcctgttggtctaggttcactgaaactgaaataacatctgatgccattatcgatgataaagttttatcatctgaagctagcaataattcacgaatagaaacaattccattaagctgaccacgtgtatccagaacataaatatacgaaattgattcaacccctgccccaatttttctaatatgcgacagcgtatctttcactttccaattttccctggcagcaatatagtcaattgtcatcaaactgcccgctgttccagattgaaaaaccagcagacttctaattctttgttgagattcttcagacaaaagttgtataagtttttcagcctgaagtggatgaattgaaagaattacatcaacaaggtcatcaatagattgcctagctaatagctcttctcctctatccacaggcaaattggtacaaatattatattgctcctctggtgtaagataactgagaattttcgcacctttttcagtaggaaaacattttattaaagatatctgatctttatgttgaaaaccttttatttccattgcaatatcgtaggattgaatttttataagctcttgcactaagtgtgtatcttttgttgctaataattgttgtaagcattctttcatcgtaattcctccttaaggacagtggtacttggtatcattttcccacttctaggaaaactaatttcttcataaatatgggatcaatatcatcaatcattagtcttccccccttttataaaagatttattacaaataaaattttgcatataaaaaacctcccttagtaattcaactaaaggaggttgctaaaaaagacatagctaaataaagctcattccccctagttgagttttggcactatacaacgtaaaggatgaatcattcatcacttagctatcttaagaagagccttaatccgacaattcctgttctacccattggcatctttcgatatttttgggcaatagcctgtgtttgtataggagcctcacctaacaggtcatagatatctcaaattttttgttcgtttcgtgttaaagcatatctactatttttgaacttgtcaagtaataacagaacttattttttcaattaagacaatatcaacaacaatagtaatttacataatgccaattccatcgtcttacgctatgattggctgaccgtttccatcaaattgtttccattcatattctagctaccgcttttacaacttcaggaggaacattttcttttaataatgcgttatgaggctttactcctcttctaaaatagcgtaataatattcgtcccaccattcattcccatgtggtatacacttcctgaaatagccttctcttctcattccaatcttctccatcactcgatatgatggtatattctgtggctgacatgtagctataattctatgtaacttcaattccttaaacccatattccaatgtagcttgtgctgcttcagaagcatatcctttattgaaatattcagggttgaacacccaaccaatctcataagtatgctcaccaaagtatttatgaaaaactatatgaccaatcaaaatatctttatcaattaatactacaggaaagttcttagcgttttcaccaatattttcatttacaaagttttttgtatcttcttcagtaaaaaaaccttcaggtatgtatttcataacattgatatctgatgtatactcatgaacagcttgccaatctttgaactcaaattttcgtattaataatctttctgtttttataaacatttacttttccccctcaaaaaattgcaactatattttaaatcctcatttaatccttaaactaaaaagaacttgtaggaatctctacaagttctttttagtttaaggtgaatatacgggccaaacaaactatcttacagattgactgtagaaattttaggggtaatgctttgacaaatatattatataacaaatattaacatctataggatttatttttaaaaatcatatgaattaagaaaggaagtagtttttttcttagatactattattaataactgggtatcattatatttcattctgcaacttatttagaagaactatgtacatttcgaagaagtttttcaataagttttgttttttcatttacctttgtggcatatgtgtagagtaaacatccagcgccttattacattcctgtgataggtttccatcatacttccatccatccatcttttcttctttcattcttttctctatcccagggattaaatccaccctttttccattgtaatcatattgaaatcctcccttattctctgcgatttcaaccatatcagaagcaaagttatgtgctttcactaactgtattccatacaaaacaccttcgggtaaaaggctgattaataataaagaaagggtaaggaatagagctgtagttactgtattttgcattcttaatgcacctactctttttctttattttacgtttccacctaattgtttttcttttgcatttgtatcgtagataataatacttcttgctttactctttattgtttcttttttctcatcaaattgcttaaaataactagcagcttccgcatcaccttcgacagcaatcattgctggtttctcctgtacatcatagacagtaaagttacgttttgaagcaggatctttaaaatccgcattactgttatacgctttttcaaactcttttttcgctttttctgcatcaatagctatttcttcttctgcacgaagagtacctatttttacagacttagccaaagctatctcgccacctctttctaaagacgatttattatcggtatgtgttgtatctccaatcaccatatcagttacaaaaaatagacaacctacaaataacagcaacatacttgctgcaacaataaacttttgcatccctcttcatcctcccttaactttcagacttccgaaatcgaaaaccacttaaaatggtacttttcttttggttcaacaattggtttggtagcaataactctgctatttccttcattattccttctagctctttataatagttccgactagatagtaacgtactactatttaattgagattcaaatacatcttctatctcatatggtggtaaagcagttaataccttatctccaaaacattcttctactacttcatgctttaaaagagtaggcgaaaacttattcccaatgattctcgttttctctaaagctaagtaagaaacgagctttctctctttttgtgtaagaggatgcactatctttagcaattgatgcagatctggttccgctacaaagaatatgtaatccgccatttcacaaatctcatggtataaatctttatcccaatcgttccctgcatcaataatagatataggtgcttcttggttggccaataaaaccttaataaaatggtcaaaatcctgctctgtctcgttttttagctcttgatccacaataggattctttacaatataatttattttgccttgcttccattttggaattgataatatatcagattccttctgtagcatctctttatatctctgcaacataaattcactacgatagttttctggtgcctcagtatatccctttaataacggatacgtataaccatcatcatatagattctctatataattcacatcaatctgtagttcatttaaatacgcagctaaaagatgtgaaacaaaagtagcaccacttctcctgttcatgctggccacaacaattgttcttcttggaatagcaataccgatttgtttttcatataccggctcaaaagccaatttatactgtttttttataacaggtgcttttggcatcttctctgaaacggacttacgcttttgtttgtttttaaatagtttgttggaattagagccaggttcactgtcgccgcctccctctaattcacttgatgcttcttcttcatcaacaggaacctcgggcaactttgtttgttgcggtgcctgacttgctcctacgatttccgctacatttttaatatccgattcctgtagtagctgcgggatgactttattatcaatatcaattttacgagagttaaaaatgtcatagatacctagataaatcagtttcgccaaaaactcatcatcattttcacgctctgtaaataccacaatacgaatatcccgattaaagcgaatatctcttaatttctgtaagataatcaattcacgtttctcttcatgtcccgcatcaatatttaatcgtttgtcattaatacatagaatattgggctgttccgtatctagaatttcatctaggtacttgatgtgcatcacatcactatcagctacttcaaatcctgcaccaataaaatcctcacgcaaatatgccgtatatacagtatcgctaatagctaaaacgattttttttgtcataaaatcccctctctatagaaaaacacttttaaagtaataccatattttcaaacggcacctgtgtttcatcttgtaatttttttagtaattcagtaagaagtgcttctatttcaaaacctcctaaattacgtggggcattatcaagaagactgtattttacacggatctcaaagcgatcttgtatttcttctaacggcatgttaccaaataaaatttgctcatacaggaatccttcttgaagatccttttgtatattcgttctttctttatatacaatcgtaacttgcgctaattcaacaaatggattatctaaagttagttttgcattccaatttaaattccagatttcacattgtttttctgcatgtacaacatttgcagtaatagatggagtgatagtaaataaacgatcaataggtacatttgtaaggaaggttcttttcccttcttctatctgcagtcccttctcttctctttcatgttcaagtgccatttctgcaccatataatgcaatttcactaaagatttgttccataagtggcttaattccttcataagtacgaacagcaaatacgctaaactcctgggtttcatctgttctaattaattcataaatattaaattccgcagcatttacaattgcaaaaggaatatcttgtacaaaattaggattagtaaatagctcatctggtattactgtttctggatgtcttagaaactctaatcctagttggtatcccttaagaaatgcatttttactggcagctgggaataaagtttcaaattttttaagatcgtttttaaatttcttttcttcaatttcattaccaaattctctatcttgtaaaatatttgcttgatcagcaattaataaaaaatagtaattaataagagattctatttttgtttcaaaatctgtattgtctttacaatacttttcaaatctttctttgctttcgttaataatttcattcattttttctcgtctccttataaagattatggtttttaaacaaaaaaagacacaccgatggcaggttatgtgccttcggtgtgtccgtttagctaaaaattaaatctattaatttatatatttctcttagttaattgttgttcacatacaagaatacctctatgaattttaaaagtcaatacttttatcgaatccgtgtgaacatatatttactcctttttctctatttttgctatgtatttaatctaaaaaattacaataaattaaatataaataatcacaagtagtttatataagattaacaagatatatatataacttaacacaattattaattataaagagatttaaaaaatacctctaaagtcttgtatcacatacgttccttgctattaagataaattccctatcgtaatatccccaatacaaacaagccatacatcatataaatcacaaaataagaagttaaataccatattactcagaattcacaagtctaaaataatattactaagatactcacaagtaatgaatcgtattataaacaaactgaatcgtattcaaacatagcataaacagcttatatacttgcgtaaaaatgctcgtagctacatgttcctaaacaaaaaagcatgttttcaaagtaaagaacatgccaaataacccttgctttttagtgattttttaacaagggctgtttctatatttttttaaaaatactacataaattctggataatcaccatgttgcctatgataatttgttcttatatcgctgctttctcctacagacaaacttttctccttaaaataaatccaggcatctctaaactgtacacgcatgaatgctggaatagagaatatttcttgctctttcatacaacattcaacttgatctaatgcataagtcattgcatatattaataattcattttgtttttgtattgttggtaaatagattgcgatatcaacaatttcttgtctaaatgcagtcattatattttctttatctttttttcttaacgcttgtcccatatgtttcaaacgagataccgcttcttttctacacttcgctataggtctatgtaattcttttttatcattttcaataacacaattcgaagaaaaaatgacattaaacttttcaataataacttgttgtacctgccttctaacacgtgtaatacgagactcacttggtttcttatctttaggatctactgcattaaatttaataataggctttacaatctctatgtattgtcgcactttctttgcattacgcttcaactttttctttagaaaagccatttttctcgtaatctcgaaatcttcaatcttgtgcttataatgttccataccaatttttctcgaaaatgtgttgattaattctaaaagaaacataattcctctattatctcgagcctttacaaggctacttagtatagttgtttgaattaaataaaatggaatacggaaatacgataacgatatatttatcatatctgtagtttctgcagcagtgtggttgtacaatgcataatctacaatttcataaacagtacgatttccaacaggtgtttctcttacgagcttacgctccaagcaaacttgaaatcctgtataaattgttgtgtagggaatcccacttttcttagcaagatccattatttgaaattcacgtggcagcattcctatatcattgcattcaaagtgcaataagatataagtcgctaatgctgaggatggtaattctttgcgttcattttctagttttacaatattaaaaagtccattaaaaaacttaaccccatgaactttaaagttctgctgagaaaaattcaaacgtgtactcattattctaaatgactccttccgaaaagagcacaaaaaaagacactgtaatatcacatatacaaaaatctacttaaatctagatgatttttgtatatttctagataaacaatgctcaaaatacgcaagaaaatcgcctttttcagttgcacaaatttataagatcaagtaaaattatcttataaatttatacaaatcaaaaaaggttttgaagctaaagtttaatctaggtaatattgtaagtataactttcaatcaataagagtttgttgggttcctagagattaacctcgatgaaatagttggcgctattttatcaagctgaaagatcttttttttttgcttttttatgtttatttttagttaattgcggcaaaactataactatagctaagttttgccgcattttaatgtaatcatatatgcattttttggtacttgcaagacgattttttataaaatcgtcttttttttatataacaatttcctgtttaatacagttatgctattgttctattttcgaaaaaaagaagttttctagttttatattcttaaatacagaaagacttctaaatatattgaaccatatgcggaatataatgaatgttataaagcggtttcaaaactagaaaatatacattccaacattaacaataacccttatataacaacgttttcaaccaatacttccaattctaatttatcataaattagcatagtaaacaaagaaaaaaacatagaaatgattcagtaaagcaaacagcaaaaacatggaattaataataaaacgtatgaattctaagtttataaatttaagaatttataaatcatatgccacattaacctcattttctctatttttgtacaatgaatacgatcttaaaatcaatacaaaaagattactagaataaaagttaaaaaaagatataaacactaactaaaataagttagatgtaaatctagaaaagatcgattctatattgataaaaaccctttattttaaagggttatataccaatatacatattctaattttgaataatagtatttatacagattcctaaacttagtaagaaaccttgtgtttaatcaaacacaaacaaaagagttatttacagctcaacaacatactatttaggtcatttggttcttattatatcaatttcgtatttattgttactcctatgaatcacttaataaatacgaaattcactctattattttctattagtagctaaatctcaaactattatttgcttcatttgaatatatcgctataaattttcttgagtttttgcaaatttatattactcaagaaaatttatttttagtgagcgagaatcggatattagaagaaaaacttgaaggaataatcagcgagttcgagctataaaactagaactaaaactagtataagtttgttctagttttatattaaaccttgataaatcaatgttatcccttgttttattctatctaaattttgttagataaccatatagaagatacagaaaagtagaacgaatattagaatgcacaatactatagataaaccatgttatctatagatataaaaatacttgatttttagtggaattatattaagattttctagtttttctatggtagagtaatctataggaagataatgcccattctatgtagaatataacatggaagagactttctaagttttttggttgtaaggaggtgttgtttctatgagtgagaacaaaacaaacgaagaacaaaatgaatatagaatgaaagaagtatctgaacttactgggctatcgaatgacttattaagagtatacgaggaagagtttaatctacaaataaatagaactaatggtgggcatcgtcgctacacggaagatgacattaataagtttatatctattaagaagaagatccaagaacaaaattggagctataagaaagttcgctcttggttaaatggtgacgagcttccagtagcattagaagaacaccaggttaaaacaaacctagagaaaaaagtagagtatcaaacagaattaattcaagatttgactgaaaagttggatcaaagtatcaaactacaagtggaaatggtaaaacaaatgcatgagctaaagaccgagaaacaagagcttgagcaaattgtggcacgtagaaatcaggatcttatagatactttaattcaagaaaaaagaaaagaacgtcaagaacgaattgagacagaatcaaaaaaatcattcttacaaaaaatatttggaaagtaaactttgaactagattctaagtttggtttatttaagtagcaagtctaaaaatggacttgctacttttttattttgataattttaaagatgttattttttaaatgcctatgaacctattcaattattaaatatcgacattagatttatataaatatagaagaattttaacaaagataaataacagtttaattttcagtttaactttaggtttaaatttagaaaggttttagaaagatatatgtagctctagtgtgacttaaggtttaaaaaatagtttaattcttagtttaacttttagtttacataccatttccattgtgatataaataggttaggtgaatttttccactctcaagaattaataaaatagatgggagttaaacaatgaatagggatcacttttatacgttaaacattgcagaaattgcggaaagaattggtaatgatgattgtgcctatcaagtattaatggcatttattaatcaaaatggtgaagcgcaaatgcttaataaaacggctgtggcagaaatgatacagctaagtaaacctactgtttttgcaaccgtaaatagtttctattgtgcaggatatattgatgaaactagagtaggaaggtccaagatttataccttatcggatttaggcatagaaatagtagaatgttttaaacaaaaagcaatagaaatgcgtaatttataagtataggggaggaattttatatgttattaaacagtaatgaactagaacatatctattcagctaaccatagtgtaaatgatattagtattcgatggggagttattggtgctggccaaaaaggtaataaagaggctgatttattcgctggttacaagttttcgaatggagctagttgctatccgacattagctgttaactttgcagagtcagatatgatgcatttacaaaatattattaaagaagatcgtattcattttgatggtttaaagggagctgcacgtacacctgctgttgtgactgacttatttgacccggaaattaatcctaatgctaatggataccttgataaattagcacaagagctaggtcgaaagtttacaaatgaagagggagaggtaattgtagaccaattcttaatctgtcttggagctggtggtggcgttggaacaggttggggttcacttgttttacaattaattcgtgagcagtttttcccttgcccagtatctatgcttatttccttaccatccggtgatccagatgaaattaacaatgcacttgtattactaagtgaaattgatgaatttatgagagagcaagacagattatttggaaattctgatctaaagccattagcaaatgtaatcatcaatgataatactaaaatgcaacggattattgaaacacaaaagggcacgaaagacctgaaaaatagatatttaaactggaaagaagttgcgaacgataatgtagtgagtacgttacatgaaataaacattatcccagagaactatggttctgataacgttacatatgacccatcggatttaataaaactattaagtattccaggacgtttcttaacaattggaaaagcgagaattgctaaatttgatttacattcacttggaaatagtattaagagaagtttagaagagggattcttctcagcagaacatcaatttgaaacagcaacaatgtatggtggtttcgttttaagaccttctaacgcagatttcttcaaagatgttaatacggaaaataagattcgtaataccttaggagagtataaaagattggatgaaatcgctggtaaatttggtgatccaatttgggataatgaatatgcggtttgctacactatatttgctggtatgacaatgcctaaacgctatatatctcttgcgcgagaaggaaaagagttggctgaaaaacaagagcaattaagagaagaagcacaacgtaaacaggacgaagaaaaagtagatatttcttttgcaacgaatcgtgtacaaaagaacacattcaatccttataataaaaaccaaggatttggcggggcatcaagattcagtggtggtaaaaactctgcatttaaacgtcagactagtgaagttactacaacacaaaatcaacaagaagaagagaatattattagcactcttaaaacttcaaatccatttaaaaaacgttaaaaaaagcgggtctaaacgacctgctttttttattaaaatcacaaccgattacaataaaaaactacaatgcacaaattagatatctattatattttctgcatgtttaacacagatttatataatgtgatagtttaaatagattgttaggccgtcctaacaattttatttcaatcctttatcctttaaaaaattgttcggttaaaacatgtcttccgtccgaacaattttaaaaggaccaaaagactatataaatcaatgtttctagcagatttttaggaagagaagtaatccaaacttcagcgtacgagttttagtatctagattcgtgcaaattcagtttaaacttttcataatttacaacaaaattttgctgtaataagatatatagaaatggttgttatttattgaaaataaattcgagttatggagttgtatataatgaaaagtaaaacgtataaatatacaagtaaaggcacacagaaatcttttcgtttaaaagaggctgatatatttgtattcacatttttatattacaaaaggcatcttactacacgacaaattactcagctttatagtgcatttgaaggtagggatttttctgaggatagtgtgtttacaaagcttaatcgtttttcaaaatacggtgctatcttaactaaaaaaattgataaaagagatgatagtataaccagacgtgcgacattctccttaaaagatagaatggtcgattaccttcaagaaataggacggattcctacaggatcttcaaaacgtagatattcttcttcaatctcgttacatacactctgttcacgagaaacgttagtacgtacacttttagaagtatcgaaaaaaaccaatacaaataagttattatgtgagctagatattcgctcatatcatcaaaaacaaaagaaaacagaaattgaagatgcaggtttactcttaattcccgatgaacacatttcatatcaagacaaaaatatttacattgaaatggatatgtgcaaagaaacgaatgctaccttaattgaaaaggtggggaagtatattgaatatgcacaaaaaaacaatgagaatataactgttgtttttgttatgtatgacaaatcgatgtttcttgcagaagatgctgacccaccatacgtacgtatgaaaaatctcttattttctatgcgagagtatcatgaacttttaatgaatcttccaaatctaaatatacacatctgctctttgaaagaagctggagatgttatttcagatatcattctaggaatagatgataatcaaaactttgaacaagatattcttcaacctttatctcaacgtacagtaggagatgctgactggcgctacgcatatgttgaaaaagtccaaacatttaaggaaacaatagatggcggtcttagacgaacgtatagaagagataaagatgctatgcaagatttcttctttatttttgggaatgaaaatgattaccgaatgattgctagattagacgacgttgtgttttcaagaagagaaggcgatgaaggggtgccacttgttgtgatttatccaaagcgcaacaagggtagagatatacttttaatggacacttatgacaacgtattactgctatccctccaaaatgaaggtgttactatcgacgcagatgaacagatcatggcacgtactgcaaataacatacatccgaaaagacgcaagcttgttgaattatattaatcattaattttttatatacttttatacaattttattgatttttattatttaaggtgatagaattacgtttgaactaaacacaaaaaactacaatcaaatcagaacatatgaaattaaggcaagcgacacacgctgtttttacagtgggtgtcgcttgcctttttttatatggagaaaggtggaaaattaaaatggatttacaatatgcaactactacaactgagggagtgctctctgctagagaagcgtttaaaaaccctgaactagtcctcaaacatatgacagaagagggcgcaacgtttagcgtttctctacaagatatccagattccaggaaaaccgaattactattggtatgatgtaattattgaaacggcatcgaataaaaaaatagaagtaaatattgcagtactttcccaagaagaatataaccaactctgcgaaagagatagtattgatttatatttaaaacaaactgaagacgcagcaaaattcttttttgaaaaatcaaaggaattattccaaccagaattcaataatagattcaagtttaaacataaagctcaattatatctgtaagcggtaggtgagcctatatgcagacatttaaacaacgattaccgttatttactacaattggcttgattagcggatttattctttcatttggatttggtttagtaaactacatcaagttactctactatgcatttgaaccaccgtcttatcctatagaaattacatatgtaccgcttattttaatgttcttctctttacttttaggagaatttagttttaggttttacagccgtattcctgctttgcatgtgaagaatgggaaattaataattttgattgcttctcatattgcagttgatattcaatttttatggtttgcaactgctccgattcatgcaaaggttattccgtatcttacagataaatcaaagcatgttaattttggggagtatgaggccataggtcatgttttaacagggaattttcacacactcactatgatttttgtctttttacctacagtttttatgatcttgtttacactttggtatagtggtcatattgttcgttacagagaagaaatattaaagtgggtacaaaaatacgaatataaaaatcacaagttacaaaaatggtttaatagccaagaagaacagatataccctgatgtggaaattggaccgcatattgagcataaagaaatggtccggattaaggggaaagatagaacgttaaatggtatcattattggtccaattggttctggtaaaacatcaagtttaattattcctatgataaatcaagatttacactggatggtgcgtttcataaataagttcgaaactgcgtataaaaagaacgattatgatacagaagaagtaaaaggaacatttttaaatggtgtcactgttattgaacccagtaatgatttatgtcaaaaggtatataaattagttcaagcacataagattcctgcaagctcggtttactacattgatccaaccaatcctgataccaaaaatataaacattctgcgtggaccggttgataaagtagcagaagttttcgcaatggttattcaaggtttgtctgaatctaacaatgcattctttgaacaagcgcagcgtaaccaccttaagcaacatatctacttattaaaactgcataatccacaaaaagatgtcaccttcgacgatttgatcgagatgtatgtgcgcccataagggtagatttagaattgattaaatagcactaatctaggttaaccatttcaattaatggaaaaccgtagagtttctatccttaagttgatgggcatggggcatggccatcaactaataaaataataaaattaaaacacccttgcttgcagtaataaagtgaaagggtgttttaatttacgtctacaaacgagaaaaagcagttaaaataaagtaataaggtttacttcaggaaaataaggtatattatatttgttgagtagattctctttagagacaagaaaagtaggtgaacaaagtgggaaaatatcaattggattccaaaagtcaggtagctgtggcaaagttccatgaaaaacagaagcctgccaaatttgataaaaagcagcaacttgaaaaattgcgtacggagtatttgaaaaagaagcaaaaacaaacagataaataatatgttttattttccgaattttttctgtatgtaacgcaaacaaacacaagaaaataggtaagttattcatcattcaaatatatacaggctattttttcaaacctcttacttatgcaactaacgcatgcgtcagttcattaagaataactaaaaaagtcgattccttgagatgaaaaagagtaaacagtgcccttatcaggcactgttttattttgccattataatttcctccactgatttaggtaagcgatacaagctattccccacctccaaaagaatgaatcaagttcctcaccgcatatattaaactataccttttcttaaggagggctaccttaatgcgtactcctttatcctttgataaagaaactgccatactgttagcttcttgttgtgagttaacgtatgaacaatataaacaaaatggtattttcgaaataccagatggttttcaatatgtacaaggttttcaaggaaaggccattcaaacaacagaatggttcggatttatattagaatctgaggatacaattatcgttgccttcagaggcactcaaacagatccagattggattattgattctctcgtcaatcaaaaaccttatccttatgctttaaatggcggaaatgtccataacggttttctctctatttatgagtcttgtcgtgattctattatggatatgctcgtatcattgccagcacataaaaaactgctagctactgggcatagtctaggtggcgcgcttgccacattacacatattagatgcacgtataaatactgccttcgcacagtatggactttatacattcgcttctccaaaagtaggagatatcgcttttcgaaattattataaactacaagtagctagtagctttcgtttcgtcaacttattcgatgtcgtcccacttctccctccccgaaacataaattttaatgatcatgattgggagtatgcacacgtccatcacaacatgacatttacaaaaaacacaaaatccattacaaataatcattccattacaacatacaaaacatgtctgacttctcatttttaaccagtaaacaattggaaataaaatattcgtatactataataatctatgaagttatttttggatgaggggaccttacatgttaaaatttatcttcgcatttttccttattgtaatttttacggttacaggtttctttacattttcatactttgcgacaggagagtatgatggggcaggtatcatatataccactgttccatttctttcttaagcaaaataaataaaacgagcttaattttattaagcacgttttatttattaatatccatttctgttggtaaatcgataatatatctcccaatatagcaacctctttaaaactgtttaactgcattaccaataccccaaatttcattactgtactgcaaaatcgttcgatcgctcgcaaaatgaccagactgtgcaatatttaaaatcgacatttctagccacttcgttcggttctcataagctctaccgacagcttcttgtctttcagcatatggaccaaaatctcgcagaacgaaatattcatcattttgaataacgagagaatcgtaaattgcttcaaattcggctcccgactgtgcaaagaaaccattcgttaactgatctactacctttttaatgtgcccattgtggtgataataatcacttgcacgatatccaccattttgatagtaatgaagaacctcttcggctgttaaaccgaaaatgaaacagttatcatcaccgacccggtcttttatttcaacgttagcaccgtctagcgttccgagtgtaatcgcaccattcatcataaatttcatattacctgttcccgatgcttctttactcgccgttgaaatttgttcacttacatccgctgccgggaatatatcttctgctaaagaaactcgatagttttctagaaagataactttcatatattgactgacatacgggtcattatttacttttcttgcgagttcatttattaatttaataatttttttcgcgtaataatagccaggtgatgctttcgctccaaaaataaaagtacgcggataaaatgtaaaactagcatcctctttcaaacggttatacaaatataaaatatgaagaacatttaataattgtcgtttgtaagcatgtaatcttttcacttgcacatcaaaaatagaatttggatcaatggtaatccccattgtattatgaatacgctccgctaaaatctctttacgctcttgttttacctctgcaaatttctcttggaaactcgcatcatattgaactaattgtagctcttgaagcttaatcggttctttcttccactctgttccaatcgcctctgaaatgagatttgttaactgtggatttgctttcataagccagcgcctatgagcaattccattcgtcttattattaaacttatctggataaaattcataaaacaatcgcatttcccgctgctttaatatttccgtatgaattttcgctacaccgtttacgctatggctaccgacaatcgctaaatgagccattttcacaaggtcatgtgcaataatcgccattgcttcaatacgatcccactcatacggatactgttcccacagttcatgacagaaacgttcattaatctcttcaataatcatataaattctcggtaataacggtttaaaaatgtgaattggccacttttcgagcgcttctgataacgtcgtatgattcgtataagaaatcgtctgcgtcgttatgtgccaagcttcttcccatgctaacttttcttcgtctagtaaaatacgcatcagttccggaattgctaaaaccggatgtgtatcgttaatgtggatcgcaattttttcatgtagttgacgaaggtcaccatatctttctctatgcattcgaacgatattttgcaaacttgctgatacgaggaaatactgttgttttaaacgaagtatttttccctcatcatgcgtatcatctggatataaaaactccgatacagcctctgtttcacgcttatatttcaaaatatctttgcagttttgcgggaaaggaactggttcagcattccaaagtctaagtgtatttacagtactcgtctcatagccaactaccggcacatcatatggcacggccataatgacttctgcatttgtatgcctaaactctaaacgcccgtcaatttctagcggttcaacattgccgaaataacttacttctacagcttgatcatgccttcttacttcccatacgttttcatgaagaagccactgttctggaaattcgacttgataaccatcaacaattttctgatcaaacaaaccatgtttataacgaattccacagccgtgtcctggcaagtttaaagatgcaagtgaatcgagaaaacaggctgctaagcgtccaagcccaccattaccaaggcctgcatctgcttccacttcttctaactcttgtaacgaaatccctagttcagataacccttgctcgcatacatctctaatacctaaattcaagatgttacttccaagcaaacgtccaagcaaaaactcaatagacaagtaatacatttgcttttgctctccggatcgataactctcattcgttgcaatccattgactattcatatactcacgtaccatatggccgagtgtattatattgatcacgagttgtagaatctttaaaacttttaccatacatcgtctctaacttttctagaaaagttgatttaaaactttcaacatgagtaaacattttttcaccacctacatgttattccatgagacttttatacaattccttataagcaagagccgattgctcccagctataatcttcagtcatcgcttgttttacaagctgctcccataccggtttatcgtgatagaattcaattgcacgatgaatcgtatgcagcatgtcatgtgcattaaaattcgtgaaactaaaaccatttccttctccagtttcttcatcataagaatgtaccgtatcgtttaatccacctgtttctcttacaattggaatcgtaccgtatgctaatgcgataagttgtccaagtccacacggttcaaacagcgatggcattaagaataaatcacttcctgcatacacttgatgagctaattcttcattaaatccgatataaacttttaccttctccggatactcatatgccatccattcaaagaattgctcatattccgaatcacctgatcctaaaataatacattgtacatcttcttccattatttcgcggaatacagtacgtactaaatcaagacctttttgcttcgttaatctcgttaccattgaaataattggtgtatcctctttttctggcaaaccaaaataacgctgcaaggcgcgtttattttcactcttttcatataatgactctgcatcatactgagccttaatatacgaatccgtttctggattatatacgctcgtatcaataccatttacaatgccgctaagcttatcattatattttcgcagtaatccatctaacttctcaccgaaaaattcatattgaatttcttctttatatgtcgggctcaccgctgtaatttgatccgaagcgataataccgcccttcataaagttcacattcccataaaactctaactgctcactgtggaaatattcatcaccaagttctaacaagtcgtacattacttcaggaggaaatacaccttggaactgtaagttatgaattgtatataccgttttaatacgctcatataacgggttatcttgatacttttcacgaagtaagaaattaaccatagccgtatgccaatcgtggctatgaagaacatccacttcaaaatcaaggtgcggaatacactctaacaccgcttttgagaaataagaaaaacgctctccgtcatcataatgaccatacagagaatctctcttaaaataatattcattatctattaagtaatacgtaattccgtcttgctcaccttttaaaattccacaatattgatttctccacccaagcgggacgttaattactttatgtaacgtacatccatctcttaacttttgcggaatgaggctataattcggaagtataatacgaacgtccactcctaattttttcagctcttttgggagcgcacccgctacatcagctaatcctcccgatttcacaaacggtacacattctgatactgcaaataaaatattcacttgttgtcccactgcgcgaaaagtttttattactcctcttgcagcttcctcccttcgagttttcatttgaattaaaactttaatcagtggaggaaaaagcccccactgattcttttaagaataactattaatcgtactgttttgtacgcttcctttttctacaacatacggcccatcggcgtttccttttaatacgacaccgtcaccaattttcacatctttatcaataataacaccatctattatacagttatctccaatttggctcttttgcataataatactgttacgaataattgaaccttttccaattttaactgaacgagaaacaacactgttttcgacttccccttcaataatactaccgtttgcaatcattgtatttttcacgactgcaccctttaaataacgagttggtggctcatcttttactttcgtaaagatcggtgcttctttcttaaataattgcttccaaatagcaggttgcaaaatttctaagctatgtttatagtaactttcaatcgagtcaataattgctacatatccagtatgttcatatgtagcaatgtgtaatgatttcccgcgcttttctctcactacatcaaataaactgtattgttccagatctttatatgactcaaataagtctaacaataattgtttctttaacacatatgtttgaagtgaaaccccttcatggcaaacttccgtaatatcagctgccgtatgtatatgtcgctctaacaccgcttgaaaatttaatgctgttacgagatggctattcgtaataacaacgtactcttctctgcttcttagaaaataatcaatatgtcttctaaagtgtgcaaaagacccaaattcatcttggtcacattggcagtttggcgggaataaaaatagtccgtctcgttttctatctaaatcccactgttttcctgaaccaacatggtccattaacgaacgatttttatggcttgtaaaaactgccacactatgaatactagaattcaccatatttgaaagcatgaaatcaatgagtcgataacggcccccaaacggtaacgccgctagtgaacgatgccctgttactttctttaaggaaggaaaacttcccgttgcattaataattcctaacattttttctcccattcatttcatcccccttttctatttcccttcagcaattaatactacatcgtcaacattcttttctggacgaatgattgttccatcctcgataaccatttctgatccaacaatcgctctttcaatcacaacatttttaccaatcttagcccctggcataacgacagaatcaatcaccatacttccttcttccaccgtcactccttggaataacacagaatgcttcacgtccccttcaatgacgcacccttcgttaataagcgattcttctactttcgccttttcagcaatatattgaggcggttcgtttggattgacagagtaaatacgccaattacgatcgtttaaattcagtgatgtttcatcgcgaagcaaatccatattcgcttcccataagctcttcaccgttccaacatctttccaatatccttcaaacggatacgccattagcttcttcccttcatccaataaaaggggaagtacgtcttttccaaaatcgttactagattcagggtttcttgcatccatctctaaatactctttcaaaattgaccaattaaaaatatagattcccattgatgcaagattacttcttggaaattgtggtttctcttcaaactcaacaatctccatttcttcatttgtattcataatgccaaagcgactcgcttcatcccaaggtacttcaataacagaaatggatacgtccgattctttctgaatatggtaatctagcatcttactgtaatccattttataaatatggtcgcctgataaaatgagaacatactccggttcatactgacttaaatagtttaagttttgataaatggcacttgccgtacctgtataccacttaacccctgaagactccgcataaggaggtaagactgtgaccccaccgtttactcggtctaaatcccacgcatttccgattccgatataattatgaagttcgagtggttgatattgcgttaaaatcccaaccgtttcaataccagaattcgcacagttacttagcgtaaaatcaataatgcgatatttaccaccaaatggaacagctggcttggctaaattctttgttaatgcacttaaacgactaccttttccccctgctagtaacattgctacgcacttttgtttttgagccatcttgttttttgctcccctttctcgtcttcactggtcgtaatatggatacgccaaatggtggaattgtaatctctacatgtgctgcttgattatggtacggttctagaatcgtcttaagacgtttcttattcacttgtcccgaaccgccatattgctgtgcatcactgtttaaaatctcgttataatactcgaaatctggtacacctactttatagttttcatatgtagctttcgtaaaattacatacgataactaacgcatcttcttgtttatccccttggcggataaacgagaaaatactttgctcgttattattagcatcaatccactgaaaaccttcaggcgaatgatcaagctgccaaagtggttttgagcgcttatacaatgctatgagctctttaaagtaatcatgcatataacgatgcatttcaaaatcatgtaaattccaatctaaatcttcaaggtctttccactcatcaaactgcccgaattctcctcccatgaaaagtaatttctttcctgggtgagtaaagaaatatccatataataaacgaagctgagcaaacttatcccagtaatcacctggcattttatttaataacgactttttcccatgaacgacttcatcatgagaaaggggtaatatgaagttttcagagtaagcatatagtaaagagaacgtcattttctcatgaatatattttctgtactctggcgcacactccatatatttcagcacgtcattcatccagcccatattccatttgtaattgaatccaagcccaccttcatacgttggtgctgttacaagtggccaagctgttgaatcctctgccgtcataagaaaatcttcatcctctgcaaacactgcttcatttaactcccttaaaaatgacacagcgtactcattactttgctcttgtccttctttattccagtacaacatgttcgcaactgcatctactctgaaaccatcaatatggaaatatctcatccaaaataacgcatttgaaattaagaaattacgtacctctctctttcctaaatcaaaattgacagttccccatactagattttcttgtacatctttatctttatattcataggtcggtgtgccatcaaacaaatataaaccgtgagcatctttacaaaaatgccccggtacccaatctaaaatgacaccgattccatatttatgacattcgtcgacaaaatacattaaatcatgcggtgtaccaaatctactcgtcgctgcataatatcccgttccttgatatccccaagaacgatcatatggatgctcaacaagcggcataatttcaatatgtgtaaattgatgttccaccacatacggaatgagttcttctgccatttccctgtaagaatatagtgttccatcttctttctttttccaagaaccaaaatgtaattcataaactgtcatcgcttctttataaatcggttttttctttttcttacgattccagtttttatcattccattcatatccttttatatcaaaaactacagatgccgtattcggtcttacttctgcatatatagcatacggatctgcctttaaaatgacgtcaccagccaacgtttcaatcgcatatttatatatttctccttcttcaatatgcggtataaataaggaccaaatcccttcttctgtcacttgtagcatcttatgttgctcataatcccactcattaaaatctccaacaacactcattgctttcgcatgaggagcccagactgtaaatcgtaccccttgaatctcatcttccgtcacaacatgtgcgccaaagatgttataactttcatagtacttttctgtatgaaactcatctcgtttcacttcttcacaatttattacactcaatatgttcacctcacttagatgacagaattttttatactttaactatttctgcgaaaaactgcaatatccttgttaatttataaaaaacattcgtttttttcttaaaaatgttagtttttcttcacatttccgtgtaaaatatcgaattttgacgaatattcattgaaaacgctttattattcttctatatttttaccaattattttttctcaacctttattttattatgtttatcctatttttcatgctattttccactcaaaatcaaaacaaaataatctgtcataaaaaaatgtttctcaatattttttgtcacaatgttattgaaatgcgaaatttaatcctgcttttgaaaagctactttccgaaaaaggagtaactgcaaaagtaaatgaaccgaaattagaggcaggttctgttacagttggcggcgctatcgatgacaaaaactttgctggattagatggtgatttcccgttcattgatgtaactttcaaagtagaaaatgatgaattttatgaagcaaacgctcaattagagtcaccaatttttgtttactggaaacaaggtgaatcagaaccaaatagaatgcgtgtacttcaagatcaaacattctcagttatgtccttaaactcactagtagaaggaaatattaaacctggtgcgttcttaaatgaacgcgaatatttagatgaaaagttcgattatacaaagcttggcgtaaaagtatatgcgactgattcttaccgtcataagtttgaaggctcactagataaatacggatacttcaaactaaatggacttccagttaataaacgcgactataacttatatgtagaggtgacaggacatttaacaaaccgcctaacaacgaaacttggtactgaaaaagacggtaagctgcttggccaatattattatgcaagacctgacgaaaaccttgccggcgatgtaaatgctgataaagtaatcgatattaaagatgctgaaattatcgctagcaactatggtaaaaaaggactaactgtaaaagacggagaccttaataaagatggtattgtcgacgaaaaagatattcgcttcgttgaaaggaacttcttgaaaaaaggtccagatgcatctaaatcacaaacacctgtagaaaaatccaaaagcggtacactggcagatattttaaagaaattaggattaacacctaaaaaataataaaatgaaactttaatcagtgggtttttactgcccggcaaatagcggaataataaagagcactctacgtaaaatagagtgctcttttctataaacgacccttatccagcaaaaggggtatattggggatatacaagggaaaccggaaaaggaatttatattaaattatataagttcagaggtaagaagcagtttcccacctctgaattatttagcaattattatagtactggtgccattgtttcttttaatacttttacagaatgagcgaacttcactttttcctcttcatttagctcaagttctacgatttcacgtacaccttcgcggttaattacagctggaacacctacgtaagcatctttctcgccgtattgaccttcaaggtatgcagatacagttaatacgctgttctcgttgtttaagattgctttagttacacgaagtagtgacataccgattccgtagtaagttgcacctttacgctcgatgatatggtaagctgcatcacgtacgttttcgaagattttgtctaagtcttcttgtttgtactgttcgttgttagctaagattgtttctaatttttgtacaccgatagtagcgtggctccatactggaagttcagtgtcaccgtgttcaccaacgatgtaagcatgaacgttacgtggatctacatctaagtagtcacctaacatgtaacggaaacgagcagagtctaaagtagtaccagaaccgattacgcgctctttcggtaaaccagattctttccaagttacgtaagttaaaatatcaactggattagttgcgattaagaagattccatcgaatccgctatccataatgacgcgaacgatttgtttaaagatctttgtatttttctcaactaagtctaaacgagtttcacctggcttttgtggtaacccagcagtgataacaactaaatctgcatctttacaatctgcatagctaccgctccaaacttttgttggtgatggagagaatggtaccgcatggcttaagtccattgcttccccttctgcttttgcttcattaacatctactaatacgaattcttcagctacaccttggttaatcattgagtaagcgtaactacaacctacagctcctgttcctactaatactacacgattgataccttttttcatggtaatttcccctctctattgttcacatatatttttttatgattgtttaagtaattaattaaaatactaatttaatgttgtttaacttctttacattcatattgtagcacgtattattgtgaattacttcacaaattatgacctatttgtgaactttttcacatagagtgtaaagttattggaataggtgtggaatccatttcaatggaggcgttttctttagattgtgaaagggtttttcttgtggttttcatcggtaagtgaaattatatcggcgatttttagaatatatcgaccgtaactccaaatatatcagcgattattaaaatttatcgatcgtaactcaaattatatcagcgatttttgcaatatatcgatttaccgacaaaactcgacaatactgacaacataaaaaagctgtcttcagtagatcacacctgttgagagaaagcagcttcttctatatattatttattttcatccgtttctccaagtgtaggaggctacagccatacagctggggtaaaagttcaacttgaggtatcattttagatagataattccttcatatccatacaggtccaaataaataacatgattgtatttaccgctctatatacccaactgcaacagcccatacttcatatttcttctatgcataaaaaagcagactatccaaagttcacttttatacaacaaaaaagagatagcagattatgctatctcttttagtatgacccgtacgggattcgaacccgtgttaccgccgtgaaagggcggtgtcttaaccctttgataactaaaaattcttttgtttttcagttgacatactaccgcaggtcttttcattttgatttgttttaagtatatatctttttgattatacgaaacaatctgattacttatcaagtttattttatcgttttttaacaaaatggtgtcaatgaaaaaaagaagaaaaatatttgaattttttgtgacgaacttgtaggtttttgtatgattttgtaggttcgcttataagatgtgtgagtagcttttataaattcaaattgaaagcgttcgcatgaaggggatgaacataaatgaaaaaattcggattggcaacacaaatttttgtcgcgcttgttttagggattgtagtaggggcagtcttttatggcaataaaacggcgatttcttatatcacaccaattggggatatatttattcacttaattaagatgattgtagtaccaattgttatttcagcattaattgttgcagtagctggtgtaggagatatgaagaagcttgggaaactgggtggtaagacaattctttatttcgaaattattacgacgattgctattttaatgggattacttgcagcgaatatattccaaccaggtactggtgttgatatgagtaatttacagcaaagtgatatttcttcttataaacaaactgcagatgcaacagagaagaaaggttttgctgagacaattgttcacattgtaccgaaaaacgtatttgaatcgattgcacaaggtgacctattaccgattatattcttctcagtattattcggcttaggagttgcggcaattggggaaaaaggaaagcctgtctttaacttttttgaaggcgtactcgaagccatgttttgggttacaaatcaagttatgaaatttgcaccatttggtgtattcgcattaattgccgttacggttgcaaaatttggtgtagcaacactacttccgctaggaaaactagtgctagctgtatacgtaactgttatactattcgttgtgattgtattaggtattaatgcacgaatggttggagtaaacatttttacattaataaaaattttaaaagaagaattgattctttcatttacgacagcaagttcagaagctgttttacctaatataatgagaaaaatggaagagttcggttgtccaaaggcagttgcctctttcgtaattccgacaggttatacatttaacttgactggatcggctatttatcaagcgttagcggcattgtttgttgcacaaatgtacggtgtgcacatgtcactaacggagcaaataacgttattattcgttctcatgttaacatccaaaggtatggcgggagttccaggtgcatcgttcgttgttgtattagcaacgttaggttcaatggggttaccactagaaggtatcgcattaattgcgggaattgaccgcattttagatatgattcgctcatctgtcaatgtattaggaaatgcattagcggccattgttatgtcgaagtgggaaggcgaattcgataatgagaaagcaaaacaatatgtagaaacagtcaaagaaacaaaagcagcataagaaatcgttaaggagtgaataatcatggcaacattaactgaagttaaaaatggtgttcgaattgaaaaagattttttaggtgaaaaagaagtaccaaactatgcatactacggcgtacaaacaatgcgtgcagttgaaaacttcccaattacaggatacaaaatccatgaaggtttaattaaagcgttcgcaattgtaaaaaaagctgcagcgcttgcgaatacagatgtaggaagattggaattaaacaagggcggtgcgatcgcagaagctgctcaagaaattcttgatggaaaatggcatgatcatttcatcgtagatccaatccaaggcggagcgggtacttcaatgaacatgaatgcaaatgaagtcattgccaatcgtgctcttgaattattaggaatggaaaagggagactatcattatattagtccaaatagtcatgtaaatatggcccaatcaacaaatgatgcattcccaacggcgattcatatcgcaacgttaaatgcattagaaggcttattacaaacgatgggttatatgcatgatgtatttgaattaaaagccgaacagttcgatcatgtgattaaaatgggacgtacacatttacaagacgctgtgccaattcgccttggacaagaatttaaagcgtactcacgtgtacttgaacgtgatatgaaacgcattcagcaatcacgtcaacacttatatgaagtgaacatgggagcaactgcagttggtacaggcttaaatgcagatccagaatatattgaagcagttgtaaaacatttagctgcaattagtgaattaccgcttgttggtgcagaagatttagtagatgcgacgcaaaatacggatgcttatactgaagtatctgcagcgcttaaagtatgtatgatgaatatgtctaaaattgcgaatgaccttcgcttaatggcatcaggtccgcgtgttggtttagcggaaattatgttaccagctcgtcaaccaggttcatctattatgccagggaaagtaaaccctgttatgccagaagtaattaatcaaattgcgttccaagtaattggtaatgaccatacaatttgccttgcttcagaagcaggacaattagaattaaacgtgatggaaccagtacttgttttcaacttacttcaatcgattagcattatgaataacggtttccgtgcctttacagataattgcttaaaaggaattgaagcgaatgaagatcgcttaaaagagtatgttgagaaaagtgtaggaattattacagccgtgaaccctcatatcggttatgaagcagcagctcgcgttgcgaaagaagcaattgcaacaggccaatccgttcgagaactttgtgtgaaaaatggtgtattgtcacaagaagacttagagttaattctagatccattcgaaatgacacacccagggattgcaggagcaactcttttaaagaaaaattaaaagaagaggggggacaatcccctcttttttgtttacaatatagaaatgctatatatgaatagaggtagggatgttatgagcaagtttacagtagcttctaatggcgcattagaaacaacattaagaggagcagaagtattatcaacaccacttttaaataaaggggtagctttcacacaaaatgaaagagaagagttaggtttaaaagggttattaccgccagcggttttaacgttagaagaacaggcacgccgagcatacgaacaatttagttctcagccggatgatttattaaagaatgtatacttaactgcgttacatgatcgaaatgaagtattattttatcgtatattaacagatcatttacgtgaaatgttaccgattgtatatacaccaactgtcggtgtagcaattcaaagatatagtcatgaatatcgtaaaccacgtggtgtttatttatcaattaacgatccatcaggtatcgaagaagcattcacgaatatcggtgcaacagctgagaacattgatttagtcgttgtaacagatggagaaggcatattaggaattggtgactggggcgttggtggtattaacatcgcaatcggaaaattagctgtttacactgctgcagttggaatcgatcctagtcgtgtattaccggtaattttagatgtaggtacaaaccgtgaggagctattaaacaatccattttatattggaaatcgtcaccctcgtataacaggtaaagcttacgatgaatttattgatacgtttgtacaagcggtaaacaaacaattcccgaaagcacttttacattgggaagactttagctctcgtaacgcacgaaaaattttagataaatatcgtcatgatgtttgtacgtttaatgatgatattcaaggtacaggtgcagtttcacttgcggcagtattatcggcagtgaaagcttctggtgtaccgctaagtgaacaccgcgttgttgtatttggtgctggtacggctggaatcggtatcgcagatcaagttagagatgcgatggtccgcgtaggcgtatctgaagaagaatcatataagcgtttctggtgtattgatcgtaacgggttagttacagataatatggaagatcttcttgatttccaaattccgtacgcaagaaaagaagtagaagtaagtgggtggaagcaaaatgatgtgatcggacttgctgaagttgtgaaacatgtaaaaccgacaattttaattggtacatctactgttgcaggtgcatttaaagaagagattattaaagaaatggcttctcacgtagaaagaccaattattttaccaatgtcgaatccgacaccacttgctgaagcaaaaccagcagatttaatcgagtggacagaaggaagagcgttagttgcaacaggaagtccatttgaaccagttacatataacggtgtaacgtatgtgattggacaatcaaataatgcactgattttcccaggtcttggtcttggaacaattgtagtacgagcaagcgtcatgacggatggaatgttcgcagcagcagctgaagcagttgcaagtatggtagatacaagtcagccaggagcacctattttaccagaggtcgaagaattacgtaatatctcagaaatggttgcaattgaagtagctaaagttgcagttgcagaaggtgttgcaagagtgaacttaagtgataacgatatcaagatggcagtgaaagaagcaatgtggaagccagagtatcgccaaataaaagcggtagaaaaggttagaatatagaaaaaaagcccgtttataacaataagcgggctttcgcttttactactgaaaaaaagtataggaagtgtcacctttgaattggaatcaattatggaagaaagatatgtcccttttaattatattaatggtcgttgttccgattgctggggagctgaactttcatccctttaatgatacgtttcgagttagcttcggtacaccgctattcttctttttattattatttttaagaagagtaccagcaggagttgcaggtattcttgttggtatatctgtagtcttattccgagtatgtcttgactggatcatgcaaggttcatttcatatgacagaatcattttatttgcgttatcctgtgttcttctattattttatttatggcagttttttttcgctttgcagggtaaataagttccatcagaaaccaatcattattggatgccttgggatttcaattgaaattgttgcaagtatgtcagaacttgcgttttatcacatgttagtactaggtacaacaataacgatttctgaagtaaataaactcatcattattgctatttttcgtagtttctttgcacttggttttttaaatatgatgaatttatatgaaacgaaattaaaagaatcgcaagttcgaaaagaaaatgaaaatatgttaatgcatctttctaatttatatgtggaatctgttcatttgaaaaagacgttacaaaatgcggagttaattacacaagaagcatatcaactatatcgaaatttacaagtaagcgctgattcaagtagtaaaacagcattgaaaatagcgggggaagtgcatgaaataaaaaaggataatcaaaggatatttgcaggattatctaaactgttattagataaaaatgtggctgaatatgtagaaggacatgagttagcagaaatgattgttagaataaacgagaagtatgctgaaatgctagaaaaggatatacgtttttctaaacatatagaaggtgagcatgctgcataccacgtgtatacagttctatcaatttttaataacctcgctgcaaatgcagttgaagcaattgaagataaaggtgtcattattattaagctatataaaagagatcaacatatattttttgaagtaattgacgatggacctggtattgcacaaaaatataagaaattagtatttaagccaggatttacttctaagtatgatcaaacgggaacaccgtcaactggtattgggctttcttacataaatgaaatggtaacagagctaggcggagaagtgagattagaaggccgagaaaataaaagaggatgtaagtttatcgtttgtttaccggagggtagtttaaagcgggaaggggaatagatttgttttattatatcgtagacgatgatgaagttttccgttcgatgctttcgcaaattattgaagatggagatcttggagaagtaattggtgaggcggatgacggagcttttattgaggcggatcaactaaattttaaaaaagtagatattttatttattgatttgttgatgccgatgagggacggaattgaaacagttcgtcacattgcgtcaactttcacggggaaaatcattatgatttctcaagtggaatcgaagcagcttataggtgaggcatatacacttggtgtagaatattatattacaaaaccattaaataaaatcgaagttgtatctgttgtacgcaaagtgatggagcgtattagattggagcgttctatacacgatattcaaaaatcattgaataacgtgtttcagtgggaaaaaccgcaattgcgtactgaaccagtgcaagaaggaaaaaagataggggatttagggcgctttttactatcagaactcggtattgcgggagagaatggaagtaaagatttacttagtatgctggaatatttatatggtcaagaaaaggcacagacatttgagtttggctttcctgcgttaaaagaaattttccatcatattacgataagaaaattaggggatttagctttagaggcggatattgataaagagaaaaaagcgtctgaacaaagagtacgtcgagctatttatcagtcgttaaatcatttggcttctttaggattaacagacttttcaaatccaaaatttgaaagctatgctccaaaatttttcgattttaccgtagttagaaaacggatgacagaaatgacgaaagatgaactcgcatcttctggtcatacgcgaattaatacgaaaaagtttattcaagtgttgtattttgaggcgaagaggttgatggagatagagtgaagaagatgcttataaataagcatcttcttttgttaaatcaacattttatattttctcgtggagcatgtaaaatgttaagtaagagaaaatggttttatattaaggaagtgtcaaagcaatgagtttcacattgaataaatcgattattaaagaagtgtgcggagagacctcatataaaagaggtgaagcctattataaatcaaataaagtgataatagatcagtacgatgaaaataaagaaatttgtgaggcgacagtaaaagggaacgaggatttccatgttacagtagcaaaagccaaaaagggtgatgttgttgcaaaatgtagttgtccttcattagcgtcttttcaaacgtactgtcaacatgttgcagcagtattaatacaaataaactataatcaacaaacaggtagaatgagctccactagtaacagaaatgatcaattgacaagtggtatgtttcagctgtttgcagacaaaccactgaggccaaaaagtaaacaacaccgttttgatacacgtgaaatattagatattgagtttatatgtacaccagtagctacgagaagtggtggggctcttcttggaattcaattgaaacttgccaaagtgtatttcataaatcatattagagaatttctttctaaggtggagaaaagggaatcttttcattgttcaaatgaatttacatatacaccagatgtacatagttttaaacaagaaacggatgcaattattcagcagctcattaaaatgtatcataatgaaaaaatgtatgaagatacgctagaagtacatgcgaaacaagatgaaagtatgatatttataccgccagcttcgtggaaggatatgctctcttcactttctaaagttgaatatgtacagctgaaacaaaatgaacaactgtttcagggattacaagtttcaaaaggtttgttgccgttacactttgaatttacgaagggaaataatggcggatttacacttcatatagatggtctaaatcgtgtacaagttatggatatgtataacaatgcactttacgatgggaaattatatcacttacacattgaagattgtatgcgacttattgaattacaaaagatgatgagtcgctcaaatagtaatcagttttatattccagaaagtaagatggaacatttcgtcgcgaaagttgtaccaggattaatgaagctcggaactgtacacattgatgaagtaatatcggatcgtgttgaaacaccttcgctaaaagcgaaattgtatttagaccgcgtgaaaagtcgcttattagcaggtcttgaatttcactatgggaacgtcatgattaatccgctagaagaggatggacagccgtctgtttttaatcgtgatgagaaaaaggaaaaagagattttagacattatgagtgaaagtgcctttgcaaaaacagaaggcggttactttatgcataatgaagaagctgagtataactttttatatcacgtcgtgccaacattaaaaggtttagttgatatttatgcgacgacagcaatcaaattgcgaattaataaaggggatgcagttcctcttattacagtgagaagaaaagaaagaattgattggttgtcatttcgttttgatataaaaggaataccagaagcagaaattaaaggtgtattagcggcccttgaagagaaacgtaaatattatcgattggcgaacggttcgtttttatcgctagagagtaaagagtttaatgaaattaatcagtttataaaagaatcaggtattcggaaagaatttttacatggagaagaggtaaatgttccacttattcggagtgtaaaatggatgaacggacttcatgaaggcaatgttttaagtttagatgattctgttcaagagttagtagaaaacattcaaaacccgaaaaaattaaagtttgctgtgccaaatactttaaatgcagaaatgagaaagtatcaagtatatgggttcgaatggatgaaaacacttgctcattaccgttttggcggtattttagcagatgatatgggacttggaaaaacgttgcaaagcattgcttttatagattctgttttgcctgagattcgagaaaagaaactacctatattagtcgtttcaccatcatctcttgtttataattggtttagtgaattgaaaaaattcgccccgcatattagagcagttattgcagatggaaaccaagcagagcgccggaaaattttgaaagatataacggaatttgatgtcgtaattacgtcatatccattactgagaagagatataagattgtatgcaagaccatttcatacactattccttgatgaagcgcaggcgtttaaaaaccctacaacgcaaacggcaagagctgtgaaaacaattcaagctgaataccgttttgggctaacgggtacacctgtagaaaattcattagaagagctatggtctatcttccatgtcgtcttcccagaattattaccaggaagaaaagagttcggtgatttaaggcgtgaagatatagcgaagcgagtgaaaccattcgtattaagacgattaaaaggggacgtattaaatgagttgccagagaaaatagagcacttacaatcatcggagttattacccgatcaaaagagtctctatgctgcttatttagcgaagctcagggaagaaacgttaaagcatttagacaaagatacgttacgtaaaaataaaattagaattttagctggtttaacgagattgcgacaaatttgttgtcatcctgctttatttgttgatgattacaaaggaagttcagctaaatttgaacaactgttagagattttagaggaatgtagaagtacaggaaagagaatattaattttttctcaatttacgaagatgctttccattattggtcgtgagttaaatcaccaagcaattccatacttttatttagacgggagtacaccagcgcaggaacgtgtagagctgtgcgatcggtttaatgaaggagaaggggatctatttctcatttctttaaaagctggtggtaccggacttaatttaactggtgcagatacagtaatattatacgatttatggtggaatccagctgttgaacaacaagcggccgatagagcgtatcgaatggggcaaaaaaatacagtgcaagttataaagctagtagcccacggaacaattgaggagaaaatgcatgaactgcaagaaagtaagaaaaatttaattgctgaagtgattgagccgggagaagaaaaattagcatccatcacggaggaagaaatacgagatattttaatgatttaatatgaaaaagctatgctttcacatgtgaaagcatagctttttgttgtaataattatattttgttttgtgcaaagtaaagaaatcaaatgttatttaaattacttctttgtacctttacttttgtatggctttgcagctgcctttttctttgcacttgattgccaacggttccatcctttacttcctgtaccttgtcctacaccttttttcggttttgccttcgttttactcatatgatcactccgttatttaaaaatcttatttgataatagtcaatgatttagaaaatactctttataaatgactatgattgctttaagtaaaaataaactgcttgaatgctatagtatatcatgaaattgcaagtaaactgaaaggaattataaagaaaatgaaaataataagaaatactgcggattctatattccgaacgatcacattaattattgtgtatacgttagtttcggtcagtgaaacattttttggattgacgaggcagaaaaagtaaagatgttaaattaacaacaatcaataaagccgtaaaataaagaattgaaaaatattttaaaactttttgttgactttctttattttttgtatagaataatcattaataaaatgtttcagagatgtgacaacaaaacgactatgaaaggacgagtagtagtaggacgtagtttaagcgagtcaggggtggtgtgagcctgatacgaagcctattatgaagaacctcctggagttgctaaccgaaatcctttataggaaagtagacttagccgggaacttcgccgttacaagaagaacagtatcgagatatttcatctccgtattgtataagtgagcaacctctgttgctaatttgggtggtaccgcggaaccaaagcctttcgtcccagttttttgggaaagaagggctttttttgttggcttcttttcacaacatccaaacattttaggaggaaaccaccatgtatcaatcattaatgacagtaagagagactcaaattgcaattaaggaagttaaaacatttttcgaggaccaattagcaaaacgccttgaactattccgcgtatctgcaccattattcgtaacgaaaaaatcaggattaaacgatcacctaaacggtgtagaacgtccaattgaatttgatatgttacattcaggagaagaattagaaattgttcattcactagcgaaatggaaacgatttgcattacatgaatatggatatgaagctggtgaaggtttatatacaaacatgaacgcgattcgtcgtgatgaagaacttgatgcaacgcattccatttacgttgaccaatgggattgggaaaaaatcgttcaaaaagaatggcgtactgtcgattacttacaaaaaacagtacaaacaatttatggaatattcaaagatttagaagatcacttatttgaaaaatatccgttccttggaaagtatttaccggaagaaattgttttcgttacttctcaagaattagaagataaatatccagaattaacaccgaaagatcgtgaacatgcaattgcgaaagaacacggtgcagtcttcattatcggaattggtgatgcacttcgttcaggtgaaaagcacgacggacgcgcagctgattatgacgattggaaattaaacggtgacattttattctggcacccagtactacaatcttcatttgaattatcatcaatgggaattcgtgttgatagtaaatcacttgatgagcagttaacgaaaactggtgaagacttcaaacgtgagtatgatttccataaaggtatactagaagacgtactaccattaacaatcggcggtggtattggacaatcaagaatgtgcatgtacttcttacgtaaagctcatatcggtgaagttcaatcttctgtatggcctgacgatttacgtgcagcttgtaaaaaagaaaacattcatctgttttaatagaagtgagagagggtagtggtcatctccctgtcaagtagacagaaataaaaagagtattatgccacggccttttcccgatattctatcggggaaaggcccctttgataactaaaaattcttttgtttttcagttgacatactaccgcaggtcttatgttaaatgttttgttagatttttgacgctttacttactatttgttagtaatttgttttctattaaacttaatgacaaaagagttaagttggtgactcttttaccttccgaattttgtgaaatacccttttcttttaaaagtttaataattcgttgtctttccctttcaactttcaatcgtatttcatagtcaaaatacattttatttcctcctttacattttgggtctgaattttattaacctataattcaacggaattaattgtttattcaagccatactgtccagtaagcataatcatcttcatgcatttcctcatattcatcaggcgtgtattgtgtatgtaagcatttatcagaacaaaaatattctagtccctcgtgtatacaatatccttcaaacataactttattacagcatgtacactctctgtaaaagtcctctgtatcagcgaattgagtataaataatagtaatttcaagttttttgaaactagacttgtgaattcctgaccaagtataacgataaacttcattctttgggtcttcattgaatacaatatttaaatcatcttttttataattgttttgttgtaaaaaattgctaatagtattacaggcttttaaccatgcacttccataagcataaaatgattcagttgtagagcttgtaatagcttctttcggggatgtgtttttaatctctaattgataaaaagataattgtgataagaacataaaatttcctcttttcgtagtagtgttgataggtttttctctgttacctgttgccttatacgtaatgagaagtgatcggaatgcaagggaatagtattaaattttttagaattgatgttgagttgggcttttacaagtgtagaaatttgctaaacttacaatgcaaattgcggagcgacgtgaaagcataaacgaaacacaatgattcaaaaatttaatgccccttgcatgaagggaaggacgaattactatacggcaacaggtttcggtacgaaactgatatagaaccttattaatgagaaaataatggttttatttttaatagaaataaaaattataaaaatttttatacccttattgcctatttggggtaataagggtataatttagcctgaagatcgcaattgggtttgtaaatcaatcctttataccctttttggttattttatttaaaaataggtattatctgatcttactaacttattctaaggagggagtgaaattatgtttactcgaattcaacatttattacaaacgctatttactgacatgcaaagtacatttatttgggcattcattattggtggtttagtttgtggtctaatgatttggcaaggtgacgagcaaaatgcacctaaatttaaaaaaggtcttttattctgtggtgctggcgtagtagtcttcttacttgctaaaccattcgttgattacatcaaagctggtctataaaagtaggtgaaaaaaagtgatagagagctttagagaaagaaaggatcgattaaaaggggaaggtaaaattgaacttctccttaatatcgattcaaaaaaatatttagtaggtaaaatttcattttgggatttagtcatagtatcaccagctttactaatatcaattgtgggcatggtgattttttataatcagggaagtcttacaagagacacagctttaatttgtcttacaccaacgattacgttaacagcatttcagttaattaaacacccgattagatcaaatatatctttcttacaatatcggctgatatggaaatttaaatatcaaagaagacataaagaatttttctataaaaagggtgacattaatatgcaacaaaatgatcaagacataagaaaagagttaggtattcgtgatattttttcgagttgctatgaaacaaatgataatcgttttgtcaaagtaatagatgtatccgctgttaatttatcattaatgagtagtaacgagagacaaaaaatatttacttcctataaaacatttattaatgaattgcaattcgttaatgagattcaaatatcacaggtggctcagcctgttaatttatctaaacatttgattcatgtggataatattacgcatggcgaaaagaatccagcaaaacgaatgcttacaaaaagctataaagaatacgttgaggggattcaaaaaacaagagatatggttgctagaaaacgatatgtaattattgatcagccaattggaaacaatcgtgaaaaatcattaaatgatattgaaagaaaagcgtctcttgtaaccgctaaccttgaaaatatgttaactggacatgcaaggttgatagcaaaaccactaaataatgaggaattactacaattaatttatacatgtcttgattatgataatgcacagtctgttggtgaatttattatcggacgtgcccataattctttagatatatcattaggaagtgaatcggctcagaagttaattaatcagcttcaaaaacaagtggacgaaaatattaattaatgaggaagatggtacatgaaatatagttttaaaatccctaaattatttggttcgaaaaaagaaaaaaacaatttcgctcatacagtaggagatccaaacgaacaattactaacagcgattgctccttcacatattgtggagatggaaaacggggtgaaattagggtctaaccatacaagaacgttgctagtgttagactatgaaactattatccatcaacaaagaattcaagaattgaatgagttatctgaaaacgttagctttacttattatattaaggagtttaattcggctgaagttaaagaacaactttcaaaatcagttaaacaaaataaaatcaaaatgaaatctcaacatgccgatgcttacactgtagcggatgctgaagcacaggttgattcagccattcaaatgttaagagatatagcaacagctaatgataagatttatctatttcacacgtacattcatttatcttgcacgtccttagaagagttgaataatttaacaacattaataaaaagtagaatgggtgcaattggtacagcacattccccttctatacgtgctttagatgcatttcgtgcttttttacctctcgcaaataataccattccggaaatgacgtacagaatgatgaactctgaagctgtatcgtatttctttccgtttcatgaaaatgaaatgttttcagaaactgggattgtaaatgggaaaaatatgacaacaggtaatgttgtaattgttgatgatgaaaatttattaaataaacatgaattcgtaatcggtatttcaggttcaggtaagtctacgtatttgtttgctgatatgatgcgtaaatggcaatttggaagaagggttattgcaattgatccaaaaggtgagtttggaagcaaatttaaaaatcttggcggagaatgggtaaagttcaaattacgtggaggtaatagaattaatccctttgatcttccaaagattacttcatctacagaggaacttgatgctggaagtgttttgttagttaaaatcacacaattattaactatgtttaggcttatgtatccgtcaatgacagatttagaagaagatataatttctaaaattgttattgaagtatataaggacaaaggcattgattatgatacggatactaccaaaattggtgtaaaagatgtcccgattatggaagatttgtacaataagttggatgaatataaggaaaaggataaagaattgtatgctgaaattagaaatttccatacaacattagaaacatacacatatggtttgtatagtaatttatttaatggctatacaaacgtaaatatttcgaatgatttaattgcttacgatatttttgatttaaataataacgaaaaagtccaacgtattatttattataatttactgtctcataccacatatgagcttcttaaaggagataaaaggtcaacccaagtttatatagatgaagcccatgtaattgctgatcctaaagtaccactagctatgcaatatgtatactttatgatgaaagtcttacgttccttcaatgttggaattacaccagcaacacagtccattaaagattttatgagtgcaaaagatgaaaagcgaaactacggtgaggctgttattagtcaatctgtacaaaggttatatcttcctatgacacaagaagaggtaacttatctagaaaaagaattatctcatgagttttcagaacaggagaagacgaccttagttgtacgagaaggagataaggataaacaggctggtaaaggcattctattctcagggtctaagaaaatcaaagtagaagtacaactaacgcctttagaaaaacaattatggtttgaaaataaaaaaatagaagatatagcaatatagattggtgagatttagatgaatagtagaaacggaagttacattacttatctattgtttaaaaacccgtatattttagcgttttttctattgcttgtttttacgttcggattaatgtccatctttttctttgccgatgctggaagtaaagataattcccaagataataatatgggcaatggaagttatatgtgcacagagggacaagtaaatgaaggtgtatatatgaaggcctttgaaaaggctggtgtgtttactggaaaggggaaagattttattcaaattgctaggaaaaataatattgatccagttcttcttacagcaattgctttccatgaaacaggaagaggtacatctaacgctgtgaaaaataaaaataaccccgggggaatcatggggaaaggcggtttacgtacattttcaacactagatgaaggactagattatatggctggaaacttattcagattatatatatcgcaaggacttgttacgataccacaaatcggaaataaatatgcgcctgttggagcttctaatgatcctacaaatttaaacattcattgggttcctatagttacaaatatgactaatgaattaggtggtttatcaatgaattgtcaagcggtgggtcaaggatctggcggtgtagttatagatggaagtggaaatcaaatttttgatcctaacgttgtgtataacagtatggcaaaattcttagggcaagcatatgtgtggggtggagcatccccaacaggatttgactgttccggtctaatgcaatggaactttagacagactgttggcattaatctaccaagaacagccgaagaacagtatcatgcaacagcaagggtcagcaaagagcaacttaaagctggtgatttaatattcttcaccggaacttatgtcgggaaaactgttacacatgtgggaatgtacattggaaacggaaaaatgattaattcgaataattcaggtgtaaagatagatgatgtcttttcgccttattggggaaagtattattatggtgctggaagaataactcataaataaaatatgaggttataaggtgaaaaaaatgaataaaagccaaaagaaaataccgattataaatttccttttaattctatttctggttatttcatctctttattctttctcagtttataaaaagaataaagagataaataatgatattcatttattagaagaaaaattaaaaaaggaaaaagaaattagtgttatttacgatagatcaaaagagtttattgaaaagtctagtattgctgatcatggggatatgttaactggacaagcaaaggaaatgtttgaagatgcaattaagcaaaaagagcgtgagggtgctgaagacagtcgctctcactctattttagaaagaacagatatagatcatatttttgctgtgaaaacaggagataatacagcgaaatcatatgcaatctataaatctatctataattcgaatccatacgcaacagattcaatgccccagcaagtaatgactttaacaatgattgttgattgggaaaaagttaatggagaatataaagtttctgattatagaattaatgtcttaaaaaatagtttggatgattatctaaaaagtttagaaaaataatcttaaaagctggtgattattgtgaatgacctatcagacaaaatttctactttttacttttcagtaaataaaaaggtaaacaatttaattgaaaaaactatagatcaaaatcttgataaagaaaaaaagggcttttatagattgtatcaaagagatcctaatgattctgaaattctcgaaattaaaaaaactatcataatgagaaaaggaatttcattatttgctgtaatctttttaatcatgatgggtcttataagtattgcaagttaaaggagaaaccgctatgaaactaaaaaagatgtatcagatcttatctatagttcttttaatatttgtcacaatgaatattaatcttactacagcgtatgcaaaaaaaggtgaattttacgatcaaaataaaaaggctattgaaaaagaaattaaaaataaagacaaacaagagtttataaaaaactatgattacaaagataattactttgattgtgggacatttgatgtttcttgcaaagtttcgggattggcttatgaatcaattattgggacaataaaagtaacatatgatagtttgaaatcaactgtaattaaaccaagcgatataacaggaaataaagaatttaaaaaatacaaaaatgcatttaatagcctatcttcaactatgttagctatattcttgatgtggcaaatattaaaaatctattccatgcggtatgtagaacccgatggggatggttttttggtaatcaacgaaaaaatgattatgactcttacagctggggtgctattaggtatatatgatccatttataaattgggtattgggatttcaagaagtaattgtaaaatccgttttgtatgaaccaatcaaaatggaagaagtcgttttaatgatatttataaaaggttcattatatggtttcttcattgcattgatagtaatgtttgttttgtttgtattcgcattggcgtttatgtatagatttgttttgtttggactattatatgtcattggagttgtagcgatccctacagcactaaatgatgaatacaattacttctctttatggattagattatttgtaaataatagtgttacgttgtgtttacaagcattaacgttttcattaggttttatggcgctagtaaagaataatgcttttggtcatggtgtttcatttacagtagcgtttgcattctttattttggccttagcaattcctcatttacttggacaattgggagcaagtacaggttctagtagagcaattggacaatccttacgttacctttcaaggagaagataaaaggagaggactttatgaagataaaaaacataatacttgttggtgcattagcatttaccactttagttggttgtgaggatgcaaataaaaaaacagaaacaaatgaaaaagtattttttagcgaaaatgatatgaaacaagcaaaaaacatcatagaaaaggtattttacacatatgaaaatcatcaaaaacaattaacaatggacgagtttgaagaagcaaataagtctattgctcatgatatatccgaacaattaaaagatgcgtactttgatgatgtagaagtcaatatagtaaataatcatcatgaacgttcaggaaaagatgattttttagaagatcctaataattgttataagaaagaagaaggagcaatgctaggtacgtatgatccagaatgctttttaacttataaatttgaagggaataaggtgaaattacaatctcctaaaattgtatattataaaaatattaatgtgcatgagttaattattccaatgacttatgaggggaaagatttaatattaccctcattccattttgtaaaaaccaaagaaggaatgaaattaattcaaggattagggattagttcaacgatcttgaatgattttaaaactttagaagataaaacagaagaggaacttaagattgaaaaacaatctaaaacgctaaaagaaataaagatgtataacattttttaagaaatatggtggtgatagaacgtgcgagttaatattaataaattagcaaacatagaaattgaagataatacactcaaatatcggattccaataacagaattaaatcaagatgatcttaatattattgaaaaaaatcttaaaagaaaaatacagagtatagataatgatccacattatttagttccatttgagatgcaaatattaaatgcatctttaatactttattatgacatggagaaatataaaagttttgaataccttagatcgttagaatttagtgagcaattaaaatatttttcatccatgattcaaatagctaaaaatagtgtgcatacaaaaactttatggaataaatataattttgttttagacgaatatgaagacaagatgaaagtagttatttatgaaacaactgatttgaaaatttatgacataaaagactcactaattggcgttaaggagttaattttgttaagtctaacaaaattaactcaaatttatggaaaaccacgccgtacggactttatagatcctagtgatgaaataattcaatttgcggaaaccttgttacaaattgatgatcttgaagatctagatcattttgttaatacaaaaatgatccaatcagaacactttgaacctgaagaaacggaagtagaagaagaaaaggttactaaggataaaaaatggagtttaaagttaaaaagtaataaaaatgatataaaaaaaagagaaaagaaacagcaacagcaaaagaaaaagaaaaaaaataatagcaaaaaaacctatatcatattaggtagtgttataatattagccataggtttaaattttgcccttacttctttaaatgatagtaagagtgcggaaaagaataagcaaaatgcaaagaaacagtatcatgctgaagtcttaaagaagaataagcttgataataaaccattgagccaagacgaaaaggataaactgtttgatgcatatcaaacagctttaataggcgaaaatcagaaggcaattgaatcattagaaaacattggatatgaaaaccttcgaagcgtagaccaacaagtattagataatttatacaagaaaacggatcaggtatataaattatttgataagaagccttctcttgtaaaaggtattgtaaatgaaatgctggcaaataataaaggtgacgaattattaaagattcaagagaaaatggaatctaaaagtccatatgtagattttgaagttgcatatattaataaggactggaaaaaggttgttgaattaaaagatgaagtagatttaaatggaagaagagaaaaacagattgtagaagcgtttacgtctctgaagaaatacaaagaagctaaagattttgctcaaaaggtcggaaatcctgtattgttagaagagataaaagctttctctgaatagaggtgtgaaaaggtgacattattaaaaaaaattgatcatacaggtagaattactttgccaaaagacttatgtggcaaatttggtttaaagaaggatgatcaagtagaaataacgcatgatgaacagtttattaaaattagaaagcatcaacctgagtttgtttgtgcggtgactggtaaaataacagatcaaggacaaacaatcgggaacgcttttatttcctacgaaggcatagaacaaatcctacaagagcaagagcatttaaaagaaaaagaaaaaaagtaaaaagcaatccctacttatagatagggttgctttttacttttttatttaattagttttagattcgtttaccgcaataatattacattttttcttaaaccttcttttaacttcttcttctaatggtagtgttatatttttctctgagaaagctttaactgtgtgttcttgcacttcagtatggtcttcaatctgatatgtaataatataagttttggctttaaatttattcatgtgtccccaatccttgtcttctatttagtattaaatttgattttacgtatgtaagtcggtagaatttggtttatattaccacttgaattaatgcaattagtagtttattctataacttatcaaagttcaaaactattattctgattataatgatatatgtatttcggaaattatcactctcctattattactcaaacaattaaattgtagatttcttctcctgtatactaaaatagtacatttaccaacatcttattaaattttataaattctagtataacttgattataaactacatatagtttataatcaaatacgaatgtaaaataaatatggtttaaattataaataatgaaatatatagatattttgttattagagaattgttaaattggagtcgaaccctgtttacttttttttagttgctttatttagttctttttttgtaaatttaataactgaagactcaaaccaatatggagtttcagcaataataatatccgcatcaattatctttccacgtttataataagtatggaatttcccctgtgaatatggaactccgctctgagttaaatattctgagaacattttttgattatatattttttctttatgaagatcttcctcagaaatttttaatatgtctttttctgatattaaatttgtatcttgttgaaagaatttaataatagtttgtagtgcaaataagagatcattatcttttaaatgtgtatacaatgtattcatattaaatgaatataaacaaggatcgttaataaaaagtgacagttgataaaatgtatcttcaacattggtcaatggacatagagcaccgttcattctttctttaacctttgggtattttttataaatttcttcaagagattttttcaacagagttcccccctttcgacacatcctcataagagtaatgttcaaataaatgtgtatgacttaacttttgaaataccaatttaatttttccccaatcgctttttttcactcaatattgttaaacaaattttgtttaatttttttacagttttatttcctacaaaaaaatattttccattatttttatataattagatatatatgtaagttttaagtgtgttttataagaaaaaatacgcttttttgtgtactatttcagagtatcaattgatgtttataaattcaacaatatatgtataaaaaataaacaaaatatgatataattttaaaaaaggaggaatctacaattgagaacattttttgttaaaagattgtttggttatcccttattatacgctttcatttggtattacctatatcaaaattttacagatttgtatttcgttaatattgctgtaaggcaaattaacagtatcgtaagagaattcccttttatttatagtaacatgagcacatattttatattatttggttttatatttggatatatttactccactatctcaacgcttgtaaaagcaagagaatttagaggaatattgtttgtatgtgtattatctactaagacattgtttgccattataacaattccctttggaattattatgttttttgtagagtgtatgtctcttattattattatgacaagtttatttctatttagaaacatgaaatatagatatctagtcaattaattatgttcgtgtttcgcaaaaaaacatagatattaaaatttcaattaccgaaatgatactataaaaattcgaggtgaggaaggtgaacatttttagggggatttacgaaagattatttatagttatttcgattacccttatggtgatcctttttttatgctgttatgctggaattatttatcctgaattaatacagagttggtggaatcttatatttgtagttattatgggatatttagttttaacaattttgttctttgcatgttataaggatgaaaatcttgctaataattcaaagaatgaagaagaattttagggcaaggtgaataatgcatatgaacaatattttatttgcttgtattatgttgtgcgtaatgggaattatttgtaaatgtcaagataaacatgtacattttcgcttgtttaagcatgtacaaaatcgattttgtacatgcttaaacaagcgaaaatgtacatgtttatcttgacatttacatgatgtcttccttatcccattttaagatactgtgtaataaatatgtgattactctgcgggcgagtttattatccaaatcttctttccaagtatttggagggaatcgtttccttttgccatccaatatttcttgataaatttcttctatcgtaactgctttcattgccaatatataaatcctcctatatttgtatttatatttgtacaatatcactatcagaattattatatatatattatataatttacataaaattatcatcgaaaacaacacataaattagttttttctcaaaaatctaattattacacaaataaaaatttatttaaattttctattttttggtatatacttaaaaatgaattattatatttgtatattaggagtgtatttgtatggagaagcttaacaaaagcgatatcattcgcaccgttccacaaaatggtttctttggacatccaaaagggctatttaccctattctttacagaattttgggagcgattttcttactatggaatgagagcaatattactttactatatgtactattccatttctaaaggtggcttagggatggatcacgccacagctgcatccattatggctatctatggttcgttagtttacatgtctggcattattggtgggtggattgctgaccgcctattaggttcaagtagaacaatattttggggtggcgttttaataatgattggtcatctcatcttagctctaccaggcacggttagtacattatttatctcaatggtatttttaatacttggaacagggttattaaaaccgaatgtatctagtattgttggtgatttatatagcgaaacagacactagacgtgactcaggtttcagtattttctatatgggtattaatttaggggctctattatctccgtttgtgattggaacactcggtcaaaagtataactttcacttaggttttggtgtggctgcaattggtatgttatttggattaattatgtatgttcttacgaaaaagaaaaatctaggattagcaggaacgcaagtaccaaatcctttaacagacaaggaaagaaaaaaggtccttatacagtttagtattggtattatcgcaattgcactagttggtgtgttaacaattccaacaggtattttaacgattgatcgatttactttacttgtaagtatcttaggtattctaattccaacaggctactttgtctttatgtaccgtagtccaaagacgacagaagttgaaaaatctcgcttaattgcttacataccactatttatcgctgctacaatgttttgggcgattcaagagcagggagcaatcatcttagctagttatgctgatcaacgtacgcagttaaactttgcaggattggaggttcagtcttcatggttccaatctttaaaccctatttatattgttttactagcaccagtatttgcttggctttgggtaaagctgaattcacgccaaccaagtacagcaaataaatttgctatcggtttattatttgctggtttatcattcttagtgatgattattcctgcatatatccatggtaccgaatcccttgttagcccaatttggttagtcattagttttcttctagtcgtaatcggggaactttgtttatcacctgtaggtttatctattactacaaaactagctccagcagcgttctctgctcaaacaatgagtctatggttcttaaccagtgcatctgcacaagctatcaatgcgcagcttgttcgattatataatcctgaaacagagattatttatttcggtgtaattggcggagtatccattgttttaagtgttattttatatttcatggctccaaagattcaggtacttatgaaagggattaaataatagaactgtgccaaaaacttgttaccatgcaggtttttgtgcacagtttttttagtgctttatcgtatgtaaaactagctccttttaaacgaagaactacaaaggtaaattgatcagaagtaagtcatttatcgatatggatgattaggagaaagcatttacggtaaccccaagtcgagagtattccgatactaatatagtttatacatctaaccctatttaataggttagtgttgaaagatggaactcccgcattcgaaaatgatgtacataagttttccaaatgggcagcttattttttgttttggggttacttcaatatctaagctaaatgcctatggagcaaaactaaaaaaagacgccaaatggcgcccccaacttgggttaatgaggttttagttttccaatctaaagaaatatcgtatcagctcacaaagagagtatatcataacatccaagagaaataatatgcattcttacatatcgaaataaattttgtattcttgcactgacggaccaggaatagcaagatatgaagcatataagcgctgtaaaaatatcaattcatagaagcgattaatttctgatatgacatgttttaatatcacaaaagccatcacgaaatgatgattgcatgatggcttttgttgttttcttatttctttgtctcattgacccatgtaacgatgtcctggatgacatacgcaggaacattggaagggacttcgtattcactagggtgactgaattccccgttgccctccgtgaagatgtgattcaatttcggatattctttgaactgaacattactgcggcttgaaagcccttcttgccatctcgtaaaatcgtcttttacagttacttgataatcacgtgcgccttgcagaatcagtaatagctcttttcgtgatttcacttcctcaactggacgccaacgagtcacatcatacatgaaatgtggagaaggataattataaccagctggtgggtgatttggatcaaaagtaggatccttaatataagcgaattgtttttttagttcattaataaaatccttaggtgccccgaggtactgatactgatcaaggagcatgtcagtaaaaggacgtgcaggaggtgccattaaaatacttcctcttacaagagatgaaggtgctttgcttagtatacgcggcatggtcccagctccttggctatgtccgagaatgaaaatgttacctgggtcaataccttcctgctgcgctgctaatttcgctgcatatatggcatcatctgtagtatcttggtctaatgtagcaggttctgcactcattttaaaaccgtgttctaaggaacgtttctcgtaacgtaacactgcgataccgcttgatgaaagaccggctgcaaggtctctaaagattttagctcccataattgtactgtcacgatcttgcggacccgaaccgtgaacaagaacaacaacaggcactttttcgccaggtttatgttttggaaccgttaatgtggctggtaacgggtatgtagtatttccaattacgatttcacgttcttggtaggaatcaggttggtcataactaggatgcgggatggtataagatttctgttgcatcgtccttacgccaacttcatcaactttgccgccaggcgtgaatttaaggagtagtggaatagtagttccttcgatagctcctggaatttcaaccgtttgatggactaagtttcgttctttaataacaggtgttcccatgcttgtaatcctgctcccgccactttgtgtccaccagttttgtaatatgtttgccgtaaacttggattgaaaagcagcagacgtcaactgaagtgcttctgcatatttaccttgctggagatagtcaaaaaataatgacgtacgctccgttaaagagacttgtttcttttctgcagtttgtgccccttgtgtatccgcatgaatggttgttgtaagcggaaaagaagaaatacctaaaaaaaagagtagggtaaaagaaagtgctgatttttgtaacttcttttttttcatcctgtttaacctccaaaatgtaatggtatgaaatggggatggtaattagtggaatgattccctattggggtttcggtatatgtatgggtgaatcctgcatacatatcataaaaagtccgtatgaaagagtagaagagtccagcaatggatgtttttcatgttacaacggataaggtagaagttcaaatgcagtttaaagatgctgggagtggaacggtggaatggattatgtgcgactggaacacaggtcaaccgttatatcaaagtgataaatggaatgcttatagctaattacaatttataattatcacatagggaatagatactagataaaaagaattaacactcaaataatttcaaagtagtatattgattttaggcaggaaacattcaatacgcatacttgggagagtcgacatatggacttagaattaaaggtaaagaggaaataaatacatactacaaaaactacataatgatgaatatccgtacgactggaaactgggtcgtatagagaatggggataagtttcgtagagaaggtgaagtgaaaataggatctagtttaatagagtaaatgcacgagcaggagttgcttggtacattacacaggtagtcttcatatagaatggaattttatgtaccgattactttaggaaagcattctgtatgcaattcaaacaaatgcaaatcaaatcatgcatttacagatacaaaaaaggagctgttagtaaagctaactgctccaggtcaaggaatctccaaggggaaaagagaaagactaaggactttaaatgagttttggctaatgcctatccgtattattgacggaataatgagttttattcattcgtaacgaaattaatgtgtaagtatgttacaagaatagtccaatacctatccatgcaactcctaatatagacaatgattcgataataattaaacgtttagcctcatcttgttttggtgtagttagtttcttaattagagagaatagtccacttattccgcacaaagtaagagctaatagtagtaaagtacttgtcatcctgatcactcctagtatttggatattcttattgtataccaagctacagactaaaaaatagtaatgttattgtatcttttctatgaagcatgtacagtgtgacgtgaatcttcaatggatagaggtcgtgtaaggtaaccttcagtattagaagtatgaatattgcgtgaaaggaatgcagactgttgaaaatataaaaaacgtatagtacaataagggtgtaagctagattataacgaacaagaagtcgggtggttctgattctcgttctattgataggtcgtaagctttttgaaaagtcttggtttggtcaccaaggctttttttcgtacgcagacaggaataaaagcactgcatgtcgcaatactatatagagtagtaagctgggtttcaacgtctttgcacttcaaaatgatactgcattggtcgtgtgcaatgaaagtatggtcagtacttcaccttggaacccaatcataactacaaactggtcttagtgtcgctacttatagcggcacctttttatttaagaagatgtcttacatattcagttatacccttacctatttcacttttggtaaaaaagtaatgtatatttctaaggaaactgaatgctgtaacgattgtgccaaaagaaaaaagacgcttacgtttcttttctctctctgaacgtttacgggtggttctagtattctccacgttctattgtcacctcctctaaaaagagaagggcaaagacggcacgtattcagtgtacagtgtttgacaaatctctacaagaacttattttctggtatggaacattcaaatatgtaggatcaatttcgagtaagatgtttgaagaaacgtacaaaggttatatgtactgattctcttttactagataaatagtatcagtggatttacgatttttttcatgttgtaattaagataagttaatggagggaattagatggttcataacataatacataatagatttaaactacgagaaatcgaagaaaatgattggaaggatatacatatatacacatcaaagtccattgtgtgccgataccaagcatggggccctaattcggaaacggaaacaaaagaatttgtaaaccaagttcttcaagatgcaagtaaggtcccgagaagtcgattttcttttgcattggttgaattggattacgaaagagtggtaggggcaggtgagattaagattcgagattttactaatagggagggaaaaatagggtataacataaatccagattattggggaatgggacttgcaacggaagtagcaaggttgctgattatatttggatttgaggaattaaatcttcatcgtatttttgcgacttgcgatccaagaaatataggttcgaaaaaagtgttagaaaaaaatgaaatgacgaaagagggaaggattcgtgagtgtatattattaaaagatggctggcgtgattcccttctatacagtattttggaacaagaatggaaagaaatgaactaataagtgtatcctttgcgtaaaagtactgcgtgtaattgggctatttagaggaattaaactataaaagaataaaatctatattctttatgagtgcatagaaaaaagtgagggagaacctcactttaatttttcgttattttcttcttccgctggtacttctcgaatgattttctaagcggcagcacgtatttttcttttgtcatcgtttgtactccttgcataatatcttaagaatgtagaatgtacaatacatgtaactttctatttattatttgaattcggtactgaaaattctagcctatctaatatgtaaaatatgatttctagcaatatagtagataggctagtgaaaatcaaaacagcatgagatgacataaccacgaacgtaatatgtaaatcgaatagcccaaaatactctacatagaatgttagaaaagtagagaccatcgacaaattacatcaaaaaatataatcaaaagcaatgtaagtttgaggtaaagatttactcaataaaaaatagagatgcatgaaaggcgtgggaactaataaattattactaatagatagaaggcattgagctcaaattaaataactttattgttgatttttgagtacaagcacattgatgcaatagtaatttaagagctgcgattgtagctctttttcttatgtagctaacggtgcagttagtggaagaaggattttaatttaatatgatgaaatatgtaatcttctaggtgaaatctaagaaggaggtttaattactataaaaaatgatttgtagaacgaatgtaagggaggaaagctaacttggaaatcacaacagaaagattaattgttagactttttaagagtactgatttacaggatgtatttgctatttataataatgatgatacctaaagaaatacaacgatatatgttacctatagatgtttcttctaaaagtgcaaacaatgaactagagctagcctttgcaaatacgaaggaaggaaaatggttgagggataacacacagcgagcagggtttatcattcgttactcaaaaggtaaggacagtataacaggttatgcatatgaaccttggcatattcgttatgtaggagatatcgctgagagtatatatcaagaaaagctaactttagaagaatatatgaatctaaaaaaataaagaattgatttagcatatatcatgatgaatgcggatgtacggatttgcacttacatgaagcagaaagcatacagaatgaggatacaccgagtggtaaagtaggggaggaatttgacttgaaaaatggctatataaagggatttacaataaattacttttaaacagtttacataacatatctaatagggatttataaaaaacaagtgaataaatctcaaaatgaaaagaatacttatatcattgagacagaaagaaaaatttagtagttacattttgaaatctgcatttaaataatatttagcggaacgcttagctaaaccgactacaataaaaagaattaaaggaaatgctctatttcgacatcacaacaattaaattttgaaaaatacaccaactatttagttttaaggagttaaagcaaactgttttgcattaaaatgttatatattggataagttctataagcaagcatttaatcaatattaatatgtatagctgactgtacccgaaactaaaagacattaatactgatgaaaagtaaggtatatgatagctttataaaagggtggaaaaataaacactcacaacttcgcacgaaataccaattttacgaacaataagatagttaaataaaaatctaatacagtatttaggtattttaagctcgttagcatgaatttctttatatttgtatgtgcctatataattcatgctttatatagaaatcattaaatgctaagttagtcattaatattttttatagtaaattacattttaatttataagattttttcttaagttcatctaattaacccctcataatcatgcttaaattaaccaattcatgttaaataacgaattttaaactgtttttatatattaattttttgtatgaatttatatataaaaattgttttattttacatgcatttatatgtaatttttgcactgaattttatggtcttatacaaatttatcacatagttagctataattttcatttgactaactacactgtaccattcagttttgaacatattttagtatttcataatttaattatgtaaataagtttgtgtaaaaattgaatttaacgcgaacttgtgttcgcctcttttttctgttatattatatatgaggtgatttttatggactacagcaaacaacgtcaaaaatccgtacatcgtaaaaaattatacgaaaatcttaatgaaatgcccttttacatagaagaatttgtggagtacaaagaattgcatgatgcctctccctccaccctactgaattatgtatatgattttagagtcttctttaattggctattatctgaacaagttattgaattaaaacccattaaagacatatccttcgctgatttggagaatttaaagaaaaaagatgttgagaactttatgagatttctaaaactacaacagaatatgcagaattcttctgttaacaggaaaatttcagccttaaaatctttatttaaataccttacctccctatcagagaacgaagatggagaatgttatttttatagaaatgtaatggctaaaatcgaaattcataaagataaagaaacattaaatgcccgtgcaaaacgtatgagatctaaaatatttcataataatgatgatcaagagtttttaaattatgttaagtatgagcatgaaaaatctttaacaaaacatcagttgttctatttcctaagagataaagatcgcgacgtagcaatcctctctctttttcttggcagtggcattcgtgtaagtgaattggcggatcttcgcatggaagatataaacttaaaagaaagactcattgatgtaatccgaaaaggaaacaaagaagattctgtatggattaccccaattgcattaaatgatcttgaaaaatatatggaaattcgagataacaaatacgctccagggaaagaattaaaaaatgtgtttctatcaaaatataaacatactgcacagcctctttcagttagggctatccaagatatagtagaaaaatatactaaggcttatggaaaaagaatgtctcctcataaattaagacatacattggcaaataaattatatatggaagagaaagactcattacaagtcatgcagcaacttggacatacgagtcaagatacagctttgctatatacacaacttggggaaacaactattaaagatagtttaggcagaataggaaagaataaggaataaaagttcagcaattttacattgttgaacttttatctttttacatacttaagatttaaacgctatttattattctttttaaatttgattttattatgtaaaaaatacataatttaaatccttctataattggtatatacatactctctcttgatggatatacatgaaaattttagattcctacaattgttggttacgttaaactcgaatttaatgtgaaattgttttctttgttatcaacagcttctctagactttatatggacctcttatttcccctctactctttcaatataaaatacaaacttaaaattagattacgaataactcttttattactatttatatttataacttgtgtagagcaaatttaagtaaagaatccagaggcaataattttggttctgatgcaaaaacactttactacaaccatagaactgcaatatcctgttaacagggagattaaacagctaatccaaacaatctatgaatgaattcagcttcacttcgggcagatttcaccctttagtgaagttgcccttttttcatcatatgcatagcttcgatgtcacttaaaattaaagtagctgtacgaagtgaattcaatcctaacatagaacgaactcgcttcttgataaaacgatgatcttgttccactatgttattccagtatttctgttgtctaagttgcatactgtcaggtatgcttttcgcctttttcaattgttcaattgctataggataagctggattcttatccaccgtaatgacgcgaggtttagaaacatgaaaagaccgcaaagctttcttgaagaagcgctttgcagcctttgtgtctcttgtttcactgagataaaaatcaatcgtgcttcctttggaatacactgcacgatatagatacatccattgaccttttattttgatatatgtttcatcgactttccatgagtcatttattgtcttaagatgacgccgtactctttcatctaattccggtccatattgatgaacccaacgcataatcgttgtgtgagccatcgataaaccgcacttttccatcctttccactacattacgaaaactcaagttgtaccgcaggtaccatctcactgttaacaaaataatgtttggttgataatgcttccatttgaaaaaacttttccttttccatccgaatcacacaccctttctagagtaatagtatcagtatgtccaagttttatagatttattgtaattattctgaagtttttgcaccagaatcctataaaatgactcaatttcaaaaccactgtttccaattgaagttataataattcattataaaattcttatatttaactgtattgtaacattcgacatgcgcaagctattaatttatatggtaacatttacctgtaagacgaattattaatatgggaggcagatttattatgaaagcaagaaaaccaaaatcatttgtaaaacaatgtacaggaatcgcgttggccagtatgattggatgtagtggtattggagttttcgcaacaagtgtaagtgctgccgaaaatactaatccagctcctatgaaccaatctcttcaagcagaagtgatgactattacacagttacaagatgctattcagcataaaaatgatccttttattaatcaagtaaaaaaatttattgataaacacaaggcagaatcagaatttttatgggggaaagtgagtacttcattgaaaaacgacattgtagacttactcacaggggacaaaaaaaattactctaataaaattaacagagcccttgtaaaacactttagagaagtccctaaattattgaaactagcaagtccagaatttaaaaaagaaattattcagttactaaattacctataagatatatattaagattttatatttcaatggattttgatattagtagttccataaatttgtatttacaaggtacctttcagttaataaaatttatatataaaaatgtataaattaattaggtgtaaggattggaaatagatttaaatgcacatacggtaatcaaatttccatgttttaaatataatctgtcgggtaaaagactggcgcggtatcaattgtgacccgtttccagcctctccccataagaactgctcgtgaggttttccctcacaagcagctcaccccataaacttcatcaaaagggttatgagacctatcaaatggccccgaaatgggcagtagctaccctcttgctaatcgcaggaggatgctacacatcactggatcatttcttatatgattgtagtcatgattttaaaaatggtagccttgctttcctatcaagtgggaagagtatcggaaatattttgcctgctattatcaaagataggatgcaagctgtgctagatgcttgtaaacaaggaaaagtggccagagtaattaatgtggaaaatgcccatgctagaaagtggtatttctatggtagcgtcattaatagttatgatgtatataaggggaatgtgtcaggtattctagaatcctatcacttaagttcgtacagaaagctggataccttatcaggggcagctaagacgcgtatggaacgtaaagttgaaaaagaatttgagaaaaccgcacaaatgttggctgcttatcactataaaaaaacaggcgagaaacttaatgaaatatcttatcaagcgaaagggtctgtatactttgatacagccattcagttagataagaagagaaccaaaaagtattggtctacgaatcatgagatgtttgctagagcatttgaatcgtatgtagaatcagctttgctagatcaagaacatagaaacgattatttagtttgtgatacatattcttttgtatatccgttaggagaacaaagagaatatctgaatagaagtataaagagtttaatggaagtagctgttccatatataattaacagtatacaaggagtggggaataatgaattataacattcaaaaaggtcaatttcgtttaacgagtgcttatccaagaggtagctggtgggaattttaccgtgttacgtgtccgatttgtcatgatacaggtaattgcatgctgcatgtttcgcaagagaaggtagcatgtacacgtgtagaaagtaaatggatttacggaaaaaacacgggcaacccaagctacattcactacataaatggaaaagataagtatcgattgcctgaggcggatgaagttcagattcatgataagaaaagcaatgaggaattagatgtgtttaatcggaaattaatggatttcataccattgcaggagcatcatcatacacatttattacgagatagaaaaatgagcgaggaacaaatacaagtacgtcaatatcgatctttcttaaaacaacaaattgtgttagagaaggataatacgtatacgactgtttgggaacagcattttaaacagatggggaataaaaactgttggcagggggttccgggcttttatgagatgaggaagggtcaactttctcttcgtttgatgtcaggatctcctggtatattgatcccttttcgaaaccagtacaatcaaattgttggatggcaggttcgtgtggatgaagtgaaaaactccgttcatgtgaaatcggcacccaatggagttcaagcggaattaatcgaacagcctaatgttgtaaagataactaaaaatggtgattgtatctttgaaggcgaactagaagtgagcaaaaagctagagataccatttcaagagggacaaattgttgtaaagatacataaagggcaaaagtatctgtggctctcatcagcaaacaaaaatcaggggactggtgcaggtggtagtgaaaatccacttcctgtacatgtagcggtaccgagttctcatttaaaacattggaattctggtacattgcatcaaactaaatcagtaatgatcacagaaggacccatgaaagctgatttgattgctgatttgattccaaagcgatttaataaagcagaacttattgaagtaggaacgacggttcttgcgattcctggtgtaaacgcttggcgaattactatgcctgtattaaaggatatgggtgtagaaaatgtctatttagcgtttgatgccgatttagtagagaatcaaaaagtaaggaaagctcttatagactttgcgacagagttaaagcgattgggctataacgtaatcatagctgcatggaacccaacgcaaggtaaggggctggatgatacaatgcaagcgggatttaaacctgtatttcagagattgtgaaagttataaagtaggttgatattttcataaataggtagattgaaaaagatagagtttttaattctatctttttcttatatccaattaactaaaagaagggtagaagagaatatgaatacatctatgaaaaaaaaactagtgaatttacgagttgattttgctttcaagcgcttgtttggagtagaaggaaatgaagatatattaatagggtttctgaatgcggtactacaatcatctattgatgaagaaattacatctttgcacttagatgatccgcatcttccaagagagcagaagggtgataaattatctattttagatttgcgagctactctgaataatggtataaaattaaatatagagattcaagttcgagacaaaaaagatatgatagagcgctctttgttctattggtcaggcatgtattattcccaaatgactcaagggatgaagtacacggaattaagaccaaccatttgtattaatatagtagatttcatactatttccagaagagcaagagtttcataatgttaatacagtgatgaacaaaaaatctaagcgtatcattacagaaaatatgcagttgcattttcttgaaattccaaaagtaattcaagaatggcaaggagaacgaatgaatccatgggaagactctttagcgcgttggttattattatttcctgcgcatgaggatgagagattaacaacaatcctggaggcgatagcaatggaaaaagatccagttttgaaaaaggcaatagaggattgggagcgtttaagtagcgataaggattttttacgcttatatgaggctagagaaaaagcaataaaagatagaatatcagaaatagaaacggcagaagaaaaagctgcgaaaaaggccgcagaaatagctaccaaaaaagccacagaagagactagaattgcaactaagatagagatgattcacaatttaattaatgtcggtatacctattgagaaagtagcggaagccactgaattaagtgtggaagaggttaatgaaattttaaaaaataaagagtaaatataaataatattaaataggtaattgtgattacaaacaattacctatttttttattatttttgattgatgcccattttgtgattacaactatattttttcttgctttaggattccctctaattcataacgaaattcattagtcttcttaacatcctttaagattgcctcaagatcctcttttttaacaaattctctaatggaatggttaaataacattaatctaccgtatctttgttcaatctctttaaaccacgtttcatttttcaataacttaaagtttttacgaatcattttttctttttttgaaggaatggacataaggattcccccaaatatatcgccaattaagtcacccatgaataagcctcctttttctacattgtaccattcagaaaaaacgatgtgggatcaaaaattcaatacgctataatgaaattaagagaatatatacgagggaagaggaaataaatatgaaggtaaccagggatatgctacatgaaatgatagacaaggtaaatgaaagtgaaatacataaaatatacgatgtgttgcaatctattttaaatagtaatgaaattataattacccctagagaggcagcgttaagaaaagcgaaaaaaataaaagttgtttcgttagatgcattagattcattttttgaagagaaagaataattatatacttaatatgtaatttttatatatttaaggacgttaagaggtatgttattatgcaaaataaaaaagaaggttattatgtacatgtgtatacacttagagacaaaagtacaaaatctataaaaatagaaccatcgtgctcattgaatgaagaaatgaaagttttaggtcttacggacagtgatatttttcaaattcaaatggtatggtacgatcctaacaaagagcataaaaagtaataaaggtgtaaataaggggttgtatttttaaaatcgtattgctataatataaacgtaataagattttacaataaaatataaaattaatcagttcgcatataagagaagacctcaatatgcgccatgtccttaggggacgtgtgcgtgtattggggtctttttgcgttttgcgagcaaaaacatccggaggtgcaggaattatgttgaattggttgtctgcaaaacttatgacaacatcagtaggagatttcttactggcaaaaagtagctttacgaaaggtcttggtggtagtggcagtggtgccaatgctgaaactgtccaaaaaagcatgaacacattagtgaaaactttaattggttttgggggaatttgggtggcagcttgcgttgtattcgcagctattaaactatctggtgcacaaggaaagaaccctgaaaaccgtacacaagctatgattggtttagcttgcgcggcaattggaggctttgtcatgatcaaagcgtacgacattgctgcttgggttacaacaatctaataaaagagtttgtacaagctctcctccatttggggagagcttctcttatacaagggaggaaacaaaatgagaaaagtaactgttcctgttgatatgacttcggaacaaaaaacgctgttaggtgtattaagtaagcgccaattgatttatttattaggtggcggggcggccctttatttatatgtaccatttttatggcagttgtttgcacctattgatgcggtagtagcgttttttatttgcctaattttagcactaccaacggtagtaggtgtaatagcgtttggttttatttataaagaaaaacaacacatgtatcttgatagatttttacttatcaaaatgcgtagccgctccgaaaaaggaaagtggagaaaagggtacgagccaactacatgggcaaaggagaatttataaatgttggaaatgatatattttgcggcgatagccattgtagggtttttcttttatcggaaaatgaatggaaaaccgctgtttggttctaagaaaaaggggaaaaagcaaggtggagtagagaaacatactgctgaaaaatctggaaagaaaaacaaaaagaatacacctgctgaatcggaaattgatgaggataatgttgatttctttcgggattttgtagaagacattaaggaaattgataatcacatgattcgatatcatgatgacacatttgtcctaattgcggaagcacatccggttaactattacttactttccaatatggaacaagaagcgattgatatcaaaattgaatcatggttaaccacattagagtttaatacgaaagtatatattcaaagtaagttcgtagatttaacagatcctgtacgaaaaatgacagaaacgatgaaaggtgcgaaggaccttacaccagagacggttctatatggacaagaagttatcgataacttagagtactggcagcgttcacaacctcgatatgaacaaaaacgttatttaatttatccatataaggttgatattagtacgattacggctgatacagaggacgaattagaagaaaagattgtagataaggcatttaacgaactatatcgtcgttataatgcatcccgaaatctactatcgaaagcaaaaattaatgtagaaatgttaacgaaagataaattaatagaacttttatacgtagcatttaaccgtcggaaagccgtaaaagctcgtttccaggatttaattgaaaacgagaatttctcgctctattcaacaggggaaacaaatgaaagaaaactagagttaatgaagaaagtgctagcagaagaaaaagcagaaaaatcaaataatggggtggcgtaaatatgaagttattcggaaaaaagaaaaaggaaaagaaaaaagaaaagaaaaaagtagaagccgaagagaaggatgaattggagctagaggaggaagagctggaagaagaagtaccgacgcaattagacaatcaaacaacagtgtttgatgttattgctccagaaggtatgaaaattgatgcagaagattatggagttattaaacaatctttaggaagcaatacgttcttccgtccgttttatattccacgtgatgggtacccacgtatgatgcaaaccaattggctcaacatgttaacttcggctggagaagtggatgtcatgatcgatattcataaagagccaaaagctaaagcaatgcgatcattagatatgcagctgacaatgttacgttccaatctttctttccaacgtacacgaggaaacattgaccaagaaaaagacttagatgcaaaaattcaagatacaaacaatttaatggatgaaatccagttcaatgaaaacgactcttatatggtgagtacgatggctgttgcgtatgcagaatcaaagaaagaattagacgttttatgtgaatatcttgaagatgaaatgcaagcatctcactttaagatagcgagtacttggaaccgtgtgaaaagtggtttgaaagcggttatgccattaggtgcaccaaatacgctgcaagatacttatcgaaatatcgatagacgtgctctatgtacatttgcaccctttgtatcaggatccggaagatttaacggtgggataccaataggaaagaacaaaattactggccaagtagaatttttaaattcattcgggaatgcagattatcgtccaccaaactataacattggtgtgacaggaatttcaggttccgggaaaagtttacttttaaaaatgaagctagctcgtgaaacgtcacttgcagatacacatgcaatgattatcgatccagaaggtgaattcgtaaaaattacaaaacgtttaggtggtattaatttaaacatttcaccagaaagtaatatcattattaacccttgtgcaatcgctgtaacagaactgcaaattacagataaagatgaagaactagaagcgctggaacaatacgataagaaagaactcgtagagcgtgatggcgtgaagtatgtaagatttgtaccgattctagagaaaatcaatgaaatactcggattctttgacattattatacgcggacaagattttgatcaaccaggattaaatgtattccaacgtacaatgctagaagatgcaatccgtgaagtgtttgataaacatggtattacttcacatccttcttctttatatacagatgaagtgaagaaggtggatggacaattaattcagtctcaagtaagaaagccagagccagagttaaaagaaatctacgatgtcatagtagaaaatcatggagatgatgtgaaggcagaagagttaatcgccgcgattcgtccgttcttacgtgatggttcaaaaccattatttgatggacaaagtcattttggtcgtggtgtagaaacacagttaaatgaatcacgcgttgttaatttcaacattagccatttagaggaaggatttttaaaaccaatcgctttccacgttatcttgaactatatttgggagcattggattaagagtccagaacatgctatcaaacgaaaagtactgtatgtggatgagatgtggcagtttatcgattatgaacaaacggttaacttcttagaaaaagtagcacgtcgttcacgtaaaagaaatgccggtatgtgttgggcaagtcaggactttgttcgtatcttagaaaatgtaaaagctcgtggtatcttgcaatctactttctcttatttcttcttagaacaaaataagattgataagaaaaaaattcaagagaactttaacttaactgctggggagcttgatattattctcaacaatccaggaaaaggagaagggattttccgtgtaggagatagttcggtttggattcaaacagatccatcagataaagaaatgatgtttattgaatcgaatgaagcggtacttcaagagcttctaaacaatatgaagaaagtacaagggtacgcaggatagtagcgtacctttgtaaaggaaggtgaaattatgcttgagaaaataatagattgggtcggtggccttgttatccatatggtaaaggccctactagcgcctatttatggatttatggatactattccagttctagtctttggtggagataaatctaatctagattttttatatgcaaagaatgcagttacgaatgtattagatactggtatgcctgtcatgtttaaatttgttgctttttgtgtcctcgtcagtgtagtgattacagcagcaaaatattcagcaacgactatgaatccaaataatcgcacggcattaattgaatatgcaaaagacttaatgattatctcgatttgcctctggcatttagatttcttttataattttgtatttgatctaaattcttggattacattggaatttaaagaggcgataaatggagtaaataacgggaatttcaacccggatcaacaaatacctttattaaagtctggactgtctgacaataagacgattacagaactttcaatggaaggccataaaaatgattatatgtttatcatattcggactatttattgaagctggattaatgatatgggcaaacttttattatttaatgcgtgctgtgacactatacgtattaatgttactaggccctgtaatggtaggaatgtggttgttcccgcaaaagaaacaacagacgttatattggattcgtgagtttatgggagcagtattaattcaagcgattcacgcaattaccctatggttagtcattacacttattggaggtgcacaaaatcctatcataaaattagtattgcttgccatgtttatcccagttggtgaaattgtgaaaagttttattggccttagcaccaatgcatccgctggtattcatagagcgggtacgatgatgggtatgggtgctttagcaagtgtggctggtttggttaaaggtgttcgtgacgactaccgtagtgcaaaagataaagggaaagaaaagaaagatggagagaaagataataaagaagatgcggataacccgaaaaatgcattaggagcaaatttagggacagatgttggtacaacatctcgtgcagctcgtatgttaaaagcaggtcaaattggaagttcaattggtaaagcagcgacaggacttgcaggtatggcagcgggagctggtcttggaccgggagcgatggtagcaggctcgcaagttggaagtgcattaggtagtgctcctggtgcagtggctggtagaagtgttgctgcagtcggcgaaggggctgtagccttaggaaaacatattggttcgagtataaagaagggtgcggacacgtattcaaatctaaatggcgaatcgtatccggaactaaccgatgaagatatcgcacaggatttagctacaaaagattttgaaaattggaaagcggataatcctgattctgcagttgcgagtcgcttaaaacaagcattccctggtgcgtccgatgcagagattgctaaaaaagtagcgaaaacaaatggtgatcaaatgtctcgtttctcaaatcagcggaaacaagatttacaaaatataaagaaaaccgctacaccatatggaaatgctagagatttagttaacgctgcaacgaatgcattccaaaaggggtatgaggcagaccataaagatacgtttatgagtcagttaccagaaaatatgtcagcggaagagaaagagaaacattggaacgaccatttgaacacaaaagtacaaggatttagaaaccacgcagaacaggcggcaacaaaagcaggagccatgccagttgatgcgaaggacaaacaaggaaacaatctgtttgataagtcctatgtgaataaagatgcgtttgcttctcggcttgcattaggaaaagtcggaaaagcagtcgaggatgtaaaaggagaaacgttagaaagtggccatcaaaatatgggacaagtcggtgctcttgtcggtgcttctactgctgcatttaagaaagcatatagtgcagaccataaggcgggattcatgaaacaattccctgcagatatgccgcagcaagaaaaagaagccgcatggaataaacatttaggtcaaaaagtacaaggatttcaaaatcatgcacaacaagcggcggaatcagctggtattgtacagcaaaaagatggtacaaactatgcgaataaagaagctttcgcttctcatttatcacaacagttacaaaaagatcctgacttaaatgcgatgggtatatccagtgcggcaggcattcagcaggcagtcaacggtgtgaaaacgcacggtttgacaaatggaacaggaggtcagcaagcaaaacaagtaagtaatgttgggaacctggtacaagcttctacagaatcctttaaacaaggatatgcagctgagaacaaggcaagctttatgaaaaacttgtctccaactatgtatccaaagcaaaaattagaagcgtggcagtcacacctgaatgaaaaaggaaatgaatttaaagcagtcgcacaacaagcggcagtacaagcaggagcgatgcccgtacaggcaaaagatacgagtggtaagagtctacataatcaatcgtatattaataaagatgcctttgcttcgcaattaacgaaaggattacaaagccatgcaagtcttggaacggtgagtcaacaagtaggttctggaattactagtgcgattcaaggtgttcgttcacatggcgttgcaacaagtagcgcaatcaataaagcagtatatgcagcgacacgaacgcaagccagtatcgcacgtgcaggagatctttccgttgcggaaattgaacgctcttatgcagatgcatcaacaagtgtagcaaatattgcacaaagtgctggtaaaatgtctatcccaacatctgcagtgggacgtatgacacagcagagtacaaaacttggcatgagtgtaatggaaggtgcgaaacaccttatgcttgcggatcgcattgatacggtatcaaatgcatactttagtgccgcgagtgctgttcaacaatccggagggaatgcagtacaaagagtgataagtgggactactgctgctgttaatacatcattaggtgggaatgcagcagagcgccactataatgtgacaaaaggcttaagttacgccgcaggtgtgattggtggtgcgggtgcttatcaagcaactgcacgtatggtaagtaaacataatccgtataacagtgcagttcgtacagaagcaaaagagattcaggagattcagagaatggtaccaacaacaacagatcatacaggcgcgcaatcggttgtaaaaggtgcagtacgtcttgtgacgacaaataataaatcatggattgaagcaaaagacgctagtggaatgaagcaagttgtatctcgttatggtagtggagatagtaatatacgctctggacaagtggtatatcaggatttaaatatttcagacggacaattaacgcagtatcgtaatggtacgaaagcatctccagcctatatacaagattcaagtggtggcaaaatcaatattaatcgctcaatcaatgtaaatccaaatcaattagtaggaaaccaaaatcaaagacctttacaacagaaaccggtatttaatgaaccaccacttacagtcaatcacaaggtagacaatggtcacttctatatgtctgatttagaccaaggtggctataagaatgtacaaatggtggtagaaagagatcgtagttacatggttgcgacaacaacagacggtacagtgtcacgtatttcgccattcggaaaaggagatacgcgtttacaagcaaaccaaaggattgaaagagcttgtgaagtgaaagacagtagtattaaaccaagagaagaaatcttagtaacacaaacacaggacgaagtagtccgtacagagacgcatttgaatttatcagaacatgacccacaaaatctgattccatttgcgccaaaccctcggccatttgataggtctcataacccttttgatgaagtttatggggtgagctgcttgagggaaaacctcacgagcagttcttatggggagaggctggaaacggatcacaactgataccgcgccagtcttttacccgacaaatcttatttaaaacgtggaagtcattctttcaaattcatcattgtaaaaagataaaatcagaacgattggagtgccatttatatggtcaattgattgccattctactctgttcttctatcatgtttcaaatgtgccaattgctcctcataaagaaaaaacgagagcttagtgagtataaagccatatatatgattaaagattactttcttcttctattccaaactatacaaaaaaacacccaagagctatcaaaggtgttacttcgcctgttcaatctcctacagcaaaacgggcggaaatctcatcgatatgagaaaaaaacggtctttgatatattaggtatcgtttacaattgtaccatgtctgataatcaagccgcttaattcaaaaaagtgaaacccgttagggtttatttcgtatgcaaatctttcaatcacctacacttgccctttagaaaaaagaaacaatctcgtctaaaattgactttgcataagcttagcttgatagcgatggggtctcaccaacaaaacgcgaatttcgtacgctaagcaatttcgacaaagaaaaagccgatttcctgtacgttaagggaccggctgtattgttggtttggaataaggttcgatcaaaattatgctgtgaacattgattttataatagaaaaaacccacgcgttttgaacaaaaattaatcaaaatacatgggtttgattttgctatggagtcggcgattcatattccctcctgatggtgtgccaagttctaaactatttctggttattctagaacttacgcttttactcttccgtattaaattttgcctgcgctctattgaataatgaagcattcaccttatttcgcgataattcacgaaataaatacttacacctactaataacagccctacgacaaggcggtaagttaccggttcatctaaaaacaccgtaccaatgaatactgcaatgatcggtacaagaaacgtgaatgtaccgactttgcttgcctctcccgcattaataagtttatagtaaatgatatatgccagtggaatgccaaaagtggagccatatccgagtccaaaaaggtatttaccattccattcaatagctgaccagttttcaaaaattgttccagtacctattagaatagctccaccaataatacactgcaaagacaccatccagaaagcatctacttcgttgctcactttcttcacataaaccacaccaagtgcccagctaaatgccataagcaaccctaaaacaacaccaatgatcgatacatgaacggttaatccgtccacactgacaactacaattccaagaaatccgataatcaaacccataattttaaacggcgacatgtactctccaagccaaatccaagcaaacaatccaagtagcactggctgaaaatagacaagcactgaaaacagtcctcctggcaaataaatgagccctactgtctgtaacccaaaaaagagaatcgtattaaagaatgctgaaatacaatatttcgaccaattttcacgccatttgatcctgttccgcattttatatatgaaagctgctagtataaggcccccaatcactgcacgcatacctgcaaataataacgggggcgtataaggcacagccattttatagattggccaacttccaccccaaagaaagattaacaatagtaatgcacacgtcgattttgtaaagactttccccaattgtatatcctcccttcaatagttgaatagtaaactaagtctatatttcgaattaggcttgaacgctcctccaccaatagattctagcctatgttaagggaagatatctgcacccttttatttatccttatccatatcgaaaaaattatcttacctcagaacccctatttgtccattctccaacaaattcagcctcattataagaatagaagtttttcagaatctcctcacgattatcagagaacagctggtctgccacagctgaaactagtctaggtatcccatatctcattcccggaagcgaagaggctgagataccacagctaactacagctgaatagttaaaagcaaaaagtccatgaagaagctttgtatcctttttgtcccggcatgtgaaagtaaagccagggccaaggtaaggatatgcatcaagcttacggttggcgatatcagcaggtgcattataatagtcgtcccaacgtgcaatatggcgttcgaaaagctttagctctggacgtaaagaatgatcagtcacaagaccagtggaaatgattagaaaatcaaaagtaaaattaccttgtggagtagtgacaacagccttctcagcttcatgctgtacctcaagccatggtgcacctcaagccatggtgcacctaagtgtaatttaaagccgggatgtgaaactgcacgttcaaatgtgtcatttgtagggggttgatgcttaaagtaatgggccataacggaatatttatcagcatcagatagaacattaaaacgttcaattagacctgacacccccatttgtcgcattgggttaatgcgtggcatctccgtgcggcgaacaaacacatgagctgaacccacaccttcagataatgcaaaattggcattatcaaaagctgaggccccaccgcctaaaattgccaccttcttgtctttaagggcctcaaagtcaatgtcttctgaggtgtgtgcatagaggtgacgaggtaatgtttcggaaatcatagatggtacgtgccattcccctccaccttgaataccagtggctaagataaccttgcgggccagtaatgtattagaagatgctcctgctccttcaatatgcagtcgataaacatcttcccctgcaggctcaataagcttcatctttacctcattaaaaacaggtaaattaagaacctttcgataccaacgtagatagttcatccaatcgttccgtggaatcttatcgatgtcctcccaactttttggtccaaattgcgcttcccaccaggagcgaaaagtcagagaaggcactccaagatcaatggatatcaaatgtttaggcgtacgcaatgtcatcatacgagcgtaagttacccatggcccttcatatccttcaacgttttcgtcgatgataaggatattagatattctttcacgcaaaagtccaaaggccacacctaagccacactggccgcctcctataataactgtatcgtagacatgcccctcaggatggtgggttgggcatacccaatcctctcccccaaatgcaagataagaaagatccctttttacttgttcatttaaagcttccaaactcataatttttcattcctttcaatatatgacttattaacttctgaactaatcgttaagttattctttactttatctgaatggcggctttttcttataccgtcttatgagcagcattgatcgatttcaacaattttattaagattttctgaaatcatcgaaatttcctcacctccataatttcacaatactatacccctctatggtatgtaaaggacttttaataaaaagtttaaaaataggtgtttgacgaagaatttttttacttagaatttcccctttactgaagtgcatccttctattgtgggggtaccaccacatgtccatcaagctaagaaaaaattaatacccctaaaacaaaaaaagactgaattcagtcttttaaatctggcataccgcctacattttaacgaaaatatacgctaagcaaatttgaataagaaaagagccggactttccccgttaagggtaaattggctctttaatctttaaaggacgtaaggaatgtgcactccctcaaacttatattctcctaagaaatctaaattttagagaatattcacagctgtaattttgcaagttgaaatagcaaacctaacgattgtatttggacttataggtaaagtacctagcactataccaagacctgtttgttccacattaaaatctgctgcagtagaaccagtatttgctaaaagattcactgtagaaccaataagcgtatctagtaattccctaattggtcgttcacgacaatcacattcgcatcctaaatctacaggtggaagtaatgttatagatggtcctggcggtaaaaaacctacccctgttacatcagaaatattgaccacaaaggatgtggtaccatctgtaactgtaactaaaaaatcacttacggaagtaatagtaaataaaaagaaaagaggggggacgtttggcgcgtctgcaatagtgccaagaagcacagtttctccaataagttgttgtaaaacattctgcattggtaaaacacagcaatcacacagacaaccttcagtctctcctgttgctccggtaactccagtaggtccagtatccccggtaggtccagtatccccggtaggtccagtaactccggtaggtccagtatccccggtaggtccagtatcccccgtaggtccagttgctccggtaggtccagtatctccggtaggtccagtatctccggtaggtccagtatctccggtaggtccagtatctccggtaggtccagtaactccggtaggtccagttgctccggtaggtccagtatctccggtaggtccaggatctccggtaggtccagttgctccggtaggtccagttgctccggtatctccggtaggtccagtaactcccgtaggaccagtaactcccgtaggaccagtatccccggtaggtccagttactcccgtaggacctgttggtaatgtaaatggtggaatcggtgataaggtaggtcctacaaggctaggatcaaatgctccagcagataaaaaatcatatgaatctaaccattttgaatacttttcacttttatttgacatgtatcctccccctccttaaaaatctattcatcatatagctagtacatgctatcgataataagcttagatatatctattaagttttgctgagagtatacatatgttactaatacaattgtatttagaataacagataaaagatgtcaccatatatgtccatcaatctaacattatgaattgaacccaaagcgataattttatcttttcataggtgctcatgggaatttagtccattttttcgtttttggagggtgattgatttcttaagttgatgggcatggggtaccaccccacatccatcaacttaaggatttagactatttatgaggtaaaaacacgttactattttcttgttttaacgagaaagggtaccgtggttgttatgaatatgttgtaaagtttttacgatgcgttacattctataacatacgctttaaaatctttaatacgttaaacaaggactataattatagaaattttactataacgtttttatgttttttataaaataaaaaataggtgaatagtaatccctgtttgggtgtacatccacctattttttcaatttaattagcatgacctagtatttgtatgattttatcagctttggagttttgaatatgatagtaaatctctaacccttttctttcagctttcagtgctttccctttcattttggataaatgttgcgatactgttgattgtggaatatccaaaatattagttaattgtgttacatttaatttcttgctcttagccaattcactaacaatttgtagacgtattggatgagccataacttttaatagttcaacgttttcttcagaaactaaacctggtatattatcattattaaatttgttcataatacaacctcgcattcaatttatattttattataatcaataaatgtatattcttaatattattatattaaaattattagtttgttttactataaattaattatataattttaacttgtgcgatgagtggagctaaaatgtgtttgtcgtgaagttttttaaatgtttttagtaattaaaaaaacacaaagaaattttatcactttgaattaatgcagtataaaaatactaatgtcatcaatatacccatttatactatagataaactagcttaggatatcaaaggtaattattccctgaataaaattcattacatttaaggggtagcaccaattttacaaagtatccactttggtgtctccgtttaaaaaagtacccattctcttgtctcgatatgcggacagaaaaatgggtactaaatgaactttttctatagataattcaggattttacactataaaattagttcctactttcatgtctttgtacataaaaggacatgaatgaccataccctgtagatttaacatagttatactgaatcgtcatagtcttagaatctccaataatttgagattttgtcgtttagtccccatatctccttgctcctaacctgtataattgtattattatcttttaaattaagcattaattctattggtgttagtgttactgattcattagctccaataatatgtagtattgttttttgtgtagttgtttttccaacaactacgggtttgaacccttcttcggttttcaaatacctactgtcgccttcttcctaatttggcttcgaagattcacatcgaatacttctagcctcttcaaagttgcgtttgattttataaacgcctgtggttcaccatttgcgtctagatggcccgctaaaatgacatctatggtgtctttctatgaactgctgtaacaattcctttcaagccttcttctgtttctacaagtaacccagggaaacttgtttccatagttaatgcatctgcgtcattaatagaatatttaatgtgggggaaaagattttttgatacttgctcaacgaatgctttctttgcattcgcaagcatttctccctttgtatctcctgttacaacaaaagtagttggtgttaatgataaagttactgacttcaaaataattacccttgttttatagtagtttttaatggtatttctattgtcaactgctcgttaaatttctatttaacgaatagttttaagctcgcgagttaaactacacttgctattttagaaaatagtaaaaatcctgaaagtgggcggtctaaaaatttgctaaatcatataaaacatttaaattatgtaagtattatttttttatgctatacttttattgagtctttaattaactgaattttctgtatttatttgagaaatggtatatgatggatttagtcttatctaatttctgttatgatatttattaagatataacatatagatgggatgaggaggatactatgaacgtttcagttaaggggaacgagaagattacacaacttttaaatgaatggtatatagaaatccgtgcaagaaggattggtcaagcgcataggttaaaggaagagattgataagaagattaataacataacagaagatcaaaacctactattatattattcccttctagacttccgcttccaatacattgtagataatttaggtgtctctgcaagtagctttgataaggttgaagcgtttgagattccaacaaacaactttttaacttattactaccatttctttaaagctattcatgcttctggtattggtaactacacaattgcaaaagagcattttgacaaggctgaatctcttctcgaattagtcccagatgagattgaaaaagctgagttttactacaaattaggtgctttccattatgacatatacgaagcacttaactcggttaaatatactgcaaaggcaaaagagatttttgagaaacatgaaagttacgaacgaaacgttggattctgcgagaaccttcttggaactgcgtgtacaaagctaagagaatgggctttatcagaagaacatcttattaaagctatggatattttcaagaagcttgatgaagaaaagtatgccctaatggttagacataacttaggatatatgtattctagtcagaacttatctccattagcaatcagatatttatcagaagtgactacttataatcctagacaccataaagctttattcctgcaagctagagagcattacaagttagatgaacttgatattgcaaaagatttagctgataaagggtatagtatttgtgttgaattaggaaatagcgaatataaacacctatttgctattttaaaatgtcttatctccaatgtctctggagaggatttggaaaagactgcacttgaaggaatatcttactttgaaggcgaatcactatatgaatacatagaagaaagccaagagtatctggctattaaattctatgaagaaggaagccacattaaatcaagtgaatacttctatctagcctcgaagacacgacaaaaaatcaaagaaagggagtccttaaaatgaaaaaactagtattaggattaatgggtgttttaacggccttaactttgacaacaggcatttcctctgacaagggtaacaatgaatctgtgacacctgttattatgatgatggaacatggagatcatggtggttgaaaactaatgtacacaaaataaatactaacttaaagggaagaaatcactcttccctttttatattgtttgaatttttatatgctatcatttctttttagtaaaaaataattaaattaatatattttaataattcgttataattatatataatttttcagtaaggtcactcatttttaattccttcacagatccatctatgtaaatacctactggtatgtaatttttttccttgattccaattgcaattctaaacaatactgtctgatttgataatagatccatcatcatgtaataatcacctccaatactacttgatattgcacattatattaattgtcatgtgatattttaatggtaattttttccttttattaaaaaattaatttcagtttattaaagaatgtcttttttttataaaaagtttcatgtaatgtcttgagttcaaaacaaccaaatactgtttcatctattaaagaaattacaatttccaccaactcttggtatccttgatttttataaatcgttaccttgccatcatacatattgcataaatctggtgaatttgccacaaaatacgtcctacatgtaaatggtctatcatcatatacagtgcattttttattttctacatccagcatagggcatggttcagcatatttcgctctactactatttttattaatttgagacataggaatttttcttctctttttcgtttcttgatgattcttattaatatttttctctatatcttttgtaagcttatttcttatcttactttcctcaattgttgctaaattaattggttgaaaacagcaggctatacatccttttctacaaggagcatttttttgcagttgcttaaatacttcatcaagtgatttaaataaatcacctattaattctagacctttctcttcgctaattctaatgttctcttttaaatacaatactatatctagcatggtatttaataaccctttcttcaactctatattttcatatagggttttaccgtcatgaaacataccatcaacttttcgccactttatctgcgaattcatatgacacttcttatattttaaccctgatccgcaaggacattcatcattacgcgtagggttatataagtcttcatattcaaatatcaggtccctttttatggtttgtattaaccaatccatattttttctatattccatcatatgtacctccaattgtttttttatatacatttatttattaatcaattatactctttctctttttaaggttacatattttccctattaaaatttaattttattagctactcatttcttaaaagatatctatggaaacatcatgctatatttagctttacgaggaaggagttttcgatttgtctaatataattaatagttataaaaaagaactaagttcaatttcagactcgctagtacctagtcaattgctagattccaaatatgaagtatatattaataatcttataacagaagcagaaaaagaaggaaaagattctagtgtccattttaatgatttagatatgatttatcattttattcatcttaaagagactaaaaatttcttattcaaaaatcattaaatcttaatatttttatttataaatcaaaaaaatattttcctgttttttctatttttaaaaagtatccactttggtgtctctgtttaaaaaagtacccattctcttgtctcaatatgcggacaagaaaatgggtactaaatgaactccccccgttgataattcagcattttaaactatgaaataagttactactttcatgtctttttacacctatcttagaaagtgtacaaggacatattaactagacttataatgtatattttgaggaaaaggactctttaaattaattaagagtcctttttgttatttaggagtgaaatttgagttgaaatgtattcattcattttagattggtgatatttaatccactcttcagttgtcatattagaatttttagcaaacttttttgcatatttatatacagttctatttgtttctttaaagccgtataggttaatgccaccggtggtttcaccgataaaattaaactctttgtgttcaccaggataaaaattaaaagcgacttgatggatagtagtgtcaattacgtaatcttcaaagagaatataagaatgaagtccgaaggctccgttttgatacatgtttttaaggatatgttgatcatggaattcatgatgataatagccttgcataaaggataatctattcttagatatttcattggattccaataacaaatagtaaagtaaaacacttgcgtaaatacataaaccaccgttttggttgtattttaaaacttctttccaagctgtatcaccttttttaagaaaagaggatactaggttgtgatcttcatataaagcagcgtgagttaattttgttagataaagaattggttttatagtttgtgaggtaaagagatgccctggtgcttgttgactttgatagtgaataggtttctgtttttggtaatcataacttgtaagccattcttttttaaatacggaagaaatgtttttaatagctacattatgagggttttgagtgttgtttattttcaaggatatatcattcatgagaatcctcctttttcacatgatttcacatgtaatattggtagtgttttataagatgatatttatattataagagaaatattgagcttttcatagatagtgcctatatttataatggatttgaatactagcattattaacagatgccaataattcatacatgagaatttgagttatacaaaaaaagtcgaggctcttttaggctattcattgtaatatttcaatatcaaaaaacacataataattcagctatattctagaaaaaataagaaccctcctaattgtaggagggttcttacctttcatataagtgaatccgattttatgatttgaaaaatgaatgttgtctgttatacccctataacgctgactgttcagagcatgctctgacgttattattatactaatgtatataacggaaatcaatactataataataggtatatttaccctactctttttcgtttttacgaccttaatatcataaaaataatatctaaaaatatatagttttatagttttaaatattatatacttatacaagtaatttagctctttttacgagttgaaattaatttatataagacctgcggtagtatgtcaactgaaaaacaaaagaatttttagttatcaaaggccctccagataaaacagtattgagtccatcatatcagatggactctttttttactgtctacctataggggataataccaagtacccttctcttttttatagttttattattttaattgattcaacccaatcgtgttcttatttcacttgaattccacataaaatttagtgtcgatgattccaaaagcaactttacatggaaacggatttttttctactgaagcagcacgcatacaagaaagtacccaatgttctagttctaaaggtaaacgatatgcttgaatactaccatcattgttttttactgttataatcggtgcatttaccctggttgtagtaaaatcatccgttgttatcattgctactgcatcattagtgtaaaaaccagcgtttaatacctcataaaccattccgtcttcctcattaataatcataggtatatttagaaaggggtattttttaatatcattatgaataactactcctgctgtgttcttctttaattgattcccttgcatttttacactcccttaaatgaatctaacttgataacgttaatttgttctattttacacctattatattagaaaattgcagttttatcttgttataaaaagcatccgtacatatgacagcgctatttgatgggtcaatatcgaaaatagtcatataactagagagtaaataaccatcttcataatatgtaattattatttcttcttcatttaagtttaatttgctcgttcttttatgtgcctttttctttttcgtaatatttcctcctttttttctgcatgttaggcattatacttatcccgaccatatattttaagtggaaatttaaagattttttatttgttttcaagtccctttattccgacaaaacatagcaaagaccgtgcgagcttcgtcgatggattctaaaagggattattcctttaatatggaattttcattataggaggtggcatagcgctatgtcagaagcggagatagtatataccagcaatgaggtctatagtcggttagaagtaagtagcagcactcttagaaagtattcggatgttcttgaacgagaaggatatgatgtaagaaagaatagtagaggaagaagggaatatactgagtttgatgttgtagttattgaacagttagtagagttgagtaagcaagagggcatgactttagagaaggctgcgaaaatgattgcgaagcagtttggaatcgataataagaaagaggagtcccaaggtgcagatccagttccttatcaaatgcagtatcaatttcaacaacaatatagcgctatgataaaagaaatcaataaggtgcagcaagctaaccttttagaaatggaaaatagactagggaatcgtatagatcaaaggaataagttaattgcagaggatattaaaggaagaaataaattattaagagaagatatgaaagatcggaaggaacgtgaagaaaggatagaaaaaaggttagagataagagatgataaccttatgaagatggtaagagagattcaagatgcaaaacgtactattgtattagcccgggaagaaatagcggcagtaaaaaagaaatcttggtggatgttttggaaatgagcacttatactgaagtgtaattgtgattttaaaattctgaattttttttagaaacttataattacaagtcaaactcttatgtaatttgcagaattatgttaatatttaggtaaatgaaagtggttgaggaggacgtagtgatatgagcacaaatcttttcacgcatgaagcagttatgcaacaacttaatgatttttatcaaatgatgttgtcgcagcaaattataaaagcagctgaagtgaaaaaagaaatagatgaaaaaatagaacagattaaacatacagaagaaaaagaaaaacaaaatcaaaacttattattatattattctttactagactttaaatacagaatgctaactgatcgagtaagtattcgaaaagatagttttgaagcaattgatacaatcaataaaacgacagataaactcatagcttattattatcattcttttaaagcagaacatgctttgatgtttagtaattacaatgaagcaagaagacaatatgaagaagctgaaagcttattagagcatatttccgatgaattagagcatgcagagtttaatcaaaaatatgcggtgttaaatcatcatatgtctagtatgctaatatctattgaatacgcaaataaagcgaaagaaatttttgaaaagcatgctggatatgaggtgaaagttgcttcttgcgaaaacacactagggacagcttgtatattcttaaaacaatttgaaaaagcggaagaacatctgaatcgttctattgacctgttgcaaaaacataatgaagaaaaattgattttagtagtaagacataatctaggattattatatgcaactcaaaacttatctacattagcgattcgtcatttatcagaagtaacagagaagattcctacacactttaaagcattattcttacaagcacgtgaacactataagctaagagaaacaaatgttgcacaagaacttattgaaaaaggattagcagtttgtatggaattaggaaatgaagagtatgtatatcatttcaatattttacgttctcttaatgaagatgaagcaattaaactattagaagaagaagtgaataaaagtattccgtacttcgaaaaacagggtttatgggattttgtagaggaatatgcagaagtattagcggttcgcttccgcaaattgaatgagcatgaaaaagttagtgattatttcgatgcatgttacgaagcgaaacaaaaattactaagcaaaggggcgttaaaataatgaagaagcttgtgttagcgatattaggattagttatagcattatcatttagtaacaatacaggtgatacacaacatgctttaaaaaaggaagagattatacaatactcacatgctgatcatttttgattgctaattaacaaggggactccaattatggagtccccttgttaatggggtaatgatttgattccttttagtataacaatatttgtaaaaaatgtataggtattctaaatttataagagtgataatttgataatgaagaatatatattaagttgggattcctttttaaatatgctttctatcacaatttgaatcattgaattgtaattaaatattttaataacgcaataatagttcttatagtgggactattattgtgttatttttcgttagataaataatttcacataccgtaaagatagatatatgtaatccaagacctaaaaagaggatggaagttagaatttgaaatgattttcacaggatttcgtttaagggttctatgaatccgtatgtgtgatttttagtaactttagtgtaattgtattaatttcagttgtatgtaccgttaaaaacgaaaataaagatccgtttttcagaagagggcttaaagatatcattacacaacaatttatagtaaatatctttataatttatgatttaaatattaaaatttataatttgtccaattgacatgcccatctttgggtgctacgttttatactggcgaaagatttacgaggtttattacttgggggcaaagtttgcttcttctaggcgatatacaactagataatctaatgctatgaaccgtacgtagagagggagaaaataaacatgttaaaaaaagtaatgcctattatggctgctgttttaggagctagctttttactcacagcgtgtagtagtgaaaagaaagaaaatacagcaaatgcaaatgataaagattcaaaaacacaatccattcatttaccgtatatggcggaaatcccaacgatggatgtcagcaaggcaactgacggtgattctatgaatgtaatgaaaaacgtatttgaaggtttatatacattaggggaaggaaatacggcaataccagcagtagcaaaatcgtacgatgtgagtgaagataaaaaaacatacacattccatttgagggattcaaaatggtcaaatggaacacctgtaacagctgaagacttcgtgttttcttggaaaagagctgtgaaccctgatacagcggcagaatatgcgtttttattctttgatataaagaatgcaaagaaaattaatagtaaagagttacctatagatcagctaggggtaaaagcaatagatgataaaacattagaaatacaattagaacagcctgttccctactttatagatttgacaacgttcgcaacgttcttaccgattaatgagaagtattttgaatcaaaagggaagcagtatggtttagaagcagatcaattagtttataatggagcatttacgttagataattggaagcatgaacaaggttttcagttaaagaagaatccgaattattgggatgctaaaacagttaagttagacgaaatcaactttgatattgtaaaagataaatcaacagaaataaatttatatgaatcaggtcaaattgaccgtgtaggactaacaggtgaatttgtagataaatatagaaagaatcctgacttcaaggaacgctctgaagttactgtccagtttttacgtatgaatcaaaagaacgaagtattaaaaaataaaaatgctcgcttggctataagtcaggcaatgaataagaaagcctttgtagatacagtgttaaacaatggttcactccctgcggatggttttataccagttaatttcgctaaaggaacagacgggcaagacttccgaaaagaaaatggaacgttagtaaaagacgatgtgaaggcagcagaggagaactggaagaaggcaaagcaagaacttgggaaagagcaagtaacattagaattattaacaagtgataatgatttagccaagaagaatgcggagtatttaaaaggtgagttagaaaagaatttagaagggttaacggtcaacgttaagccgcagccacgtaaacaacaaattcaattacttctaaatagtgattacgaattaggggttgatgtatggtctcctgatattcctgatccaattacatttttagatttatttacgacggacagtacctataactttgataagtactcaaataaacaatatgatgatctaattcatgaagtgaaaacgaatttagctggtaatgagaaagctcgttgggaagcgatgaagcaggctgaaaaaatattaatagaagatggagcggtcgcacctttctaccaactaggtagatcatacttacaacgttcttctgtaaaaggcattgtcacgaatgattttggtggagaatttaattataagtgggttgagttggataataaataaaatctgctctaaaaaaggctgataaaaactctttttgatagaggactgaaatgaatattccagtttgtgtatgtagtagatgaagttagggatggtaatagaattatggataggagatttagattaacagaagaagaagaactagaatttcaggagtttataaaatcagatcaatttgctgaagctttagcaatttcttggaggtatggatgcaaaagagcaacttacttttctataagaaataaaagaaaggatgtacccattcgtttttgtgaattgattgttggaagtaattcagtcagtcatttttctaggaaaaaggaagataaaatagatttttggcacacactaattaaccttagacatcctttctataagatgattctagagatgggctggacttccattcaagagaagaatcgaatttttccacaaggtgaatttaatgaaaaagtatttgtttccacatacataaaattatcgcatgatttaatggtactaacggagaaaaggaagaatcggagttatataagacctagattgcgtatacatggatcagaagatgtacttagtaatatcaatagaattttatatcaagaattaggtgttggggtgaagaagttacaaaccgatcataaaataccacaggcgaaagtaatttcttttcaatcaaagaaggaaattccgtgtattctagaatttgcaggggctatggaaagtttagataagtttcatagtttacgtttgggttatatagataatttgaaaacaggtgaaaaattagagttttaagtaggactccatgtttcttttttaataaactcatagaataaaaaggtttaatagaaaaaaatggattccgattaaggactccattttagttacaagtactgtagggatatagtataattctagtaaggtatattgcattaaagaagtttcatattctttagctgtgattataaatggagtgtagaggtaggattctgcactctgtttttttatgttctcctataagtcttctaacataatcagttgcaatttgcattaaacaaattgataaatcttgtcttaggtaattgtacagttgcagttgccttcttatataatcttgttctttttgactaaagttattaatcatactaatgacagtgtcgtattcaaaaaagaagtatttttcatttgcttctataacaaatacatcattcttgattgggtgatttttgaaaaatgtttcaaagaaagaaacttgttttttattttcttttagtgcattcatgattcacttctccttttaaattaaatgagttgcagcatatgtaattaagcagatcactaaaataacacctatgaaagttgtaaatagagcaagaaatccaagagcaaaccgatataagaaataagcaccaagtataattgctattatgactccgattatggcagctaatgtcccgattgtatgtatagaaattacgttaaaaaatactaagcatatgacaactaaggcaataatagtaagggttctcatgagaaacctcctttgtaatttaaatttttaggatacaaagatacaaagatacaaagatacaaagatacaaagatacaaagatacatgtatcctaaaataaaaagatacggcataatgcgtatctctatatatcctctttagaactaagagtttgaagtagcttctgttctctttcagtcaattcgttttttataaagtttgcgagtagttcatctattacttcatatttttttaagcttcttaaagtacagatattttcaatcaggctaaatgtatcaggagaaacttttatatttttacgattttgcgaaccgacttgttttttttgttggtttgttgcctccgctattgtttgagaagagggtgtatgttcttctacttctcttgtcacatccgcagcttcagtaatcttaggatctttgggttgctctctctttagtaaactcacctatatcaattcctttccctaacttagtaagtttgttatctacgaaatatttaggagtatatttataatctacaatatcacctttagtttcaaatagatgaattctttcttcaagttcgcagaaaatgtcgcagaatagagctaacattctcttatcgtggtgatcttcgaattggaaaccaatacgtggataccattctaggcgagcatgattatttattattgtactgaagacattttcttcaccaaaagtatcaatggtatttttaacaatctcgttgtgcaatgaacgcttcttctgcaataatacaggtaaaattccaactacgttcatttttacaaggtgtccaaagtcatcaactaaggtttgtagataatcaaagattaacctttgacttccctcataagaaaattgttgcgtctcttgcactactataacaaagtcgcttgctaccatagcattatccactttcaggtcagtggaaggtggaatatcaatgaatatgtagtcatagtcgtatttaattttatctagcaactttgcaaaataaaaagttctatctttagtagtcttaaagttttcaattaaaaaatctgtgtactttctcatatcgtaaccgcatggaatcatatcaaggttttcatgaagttttataataccatctgatagattaccatcttctaaacatttcattaatgttttttgcatttcttctattttaaaggattttgctaagaatgtagtcccgtttccctgaaggtctgtatcaatgaataaaactttcttattaaatactagagaagctacaagagattccatacaagagtcagtagtttttcctacgccccctttttgttgggcgttaattattacgtgtccttttttcatagagattcactcctttttaaatgtaacacaattgtaacaaaagatacatgtatctttgtatcctaaatcaatcataacatatgagcaataacatgaaaaggataaatgtatccttttttatattttactatttttttatgggaaaccaaaagataattctataataaatgctgttaaatcaacattttataagtcattcaagaatacaagattaagaggatacaaagatacaaggatacaaagatacaaggatacaaagatacaaggatacaaagatacaaagatacatgtatcttttcttcttttaggggtgtatatttaatatgtatcttttttcgatatttacaaataaaaaaacttgttgtaacgtaatagacaacaagtttctcaacacaatacgatttagtttgataatatacataagaaattcgtaagaatttgtagaatatataagacacataaaacagaaaaaaacaaataaaaaaagaacggctgtttagttcgagatttctgaggtctcaaaccagacaggggaagtagatttgctgacaacatttctacttcttggtgaatacaatttgctgacaacatcttgtattccatttacgtcactgcgactaccagtgagtaaacttcccaaaccgttctaattaactatgctattgagatataaaatatctcttcttagtatagttaattagagtagatttgtaaagatagaaacccttctttaagtgcatttttaagcatgtttaagtatggatttttctgcctttgtatgcaatcttgggaagtctatttattaaggtgagcagtgatataactgctcaccttttttgttgtaaaaaatcagtggaaaggaggttcaacatgaatacagtacaaagcgctatcgaattaatactacataaagggttacgaaaatataaatctaaaaattcgaaagctggattagtatctattgcaacacaagagaaatttgaaagcaaagtgttaaatggcaagaagaataaaaaaggttcagtttttattactcgtaagaaagaagatttaagcgccaagtttggaactaggggcgtagtattatcatctgaagaagctgtactggatcatgttggacaggcttcacactggacacctaatgtatataattttggtacatatggtgaaaatggtcttcgtacaattgtggggcatactgaaaagaacctacaacaaattaactgttttgttattgatattgattcaaagtcattccctatgactgcgattaatgatgtggcattaaatgcaggttttggtgtacctactatgattcttgaaacaacaaagggctatcaagtgtattatgtgttggataaagctgtgtacgtatcaaataacaagaactttatagctattaaatcagcgaaacgtatctctcaaaacctacgagaaatgtttgctgagagtttgtcaaacgtggatttaacatgcaatcactttgggttcttcagaatgccttcagtacaaaatgttgtgatgttctttgaggaaaatgtgtatacattcaaggagttacaagagtggagcaagcgacaagacgacaacaagggaaatgaacagtttcataatgtgatagagagtccttttgctaaaaacgctcctgtagagcaaccaaaacaaatggatgaactatggttcaaacaggtgattagttgtacaaatgtatctccaaaacaaacgaaagcagggcgaaacaatgcgattttcaccctttctttagcgtgtttccaaagtcagtacgttattaaagacacaatggacttaatggatcagtttaatagtaacctagagcaaccgctagatcatactgaagttagaggaattgttatgtctgcgtactctggaaagtatcaggcagcacataaagattacatagagcgtttattacaaacatatggggtgggtggacaggcttcagctttccgtgcgccttctgtactttggaagaaacataagaaacaacgtaaggatcgtgtgcgtagtcattggcacgagtgggaagctgacattattactttcttatcgatgaattcaaataataaacctgtgctatactttacacaatcagaactgtgcgaagcgcttaacattccacgtagtacattaaacacggttctaaaaaggagtacaaaaatctataaaacggttgagggaaaaggcaaaacagcaaaaacaggactatctacacaaggaatgctaattgcatttgctttaaaggaaaacggaaaaagaagagagagctatttaaactatttacaagggctattccctcaaatgggtaatgttcttggacaagcaaaaacaagtaacgctatggcggaagaagaaacactatacggcatattagaagggctaccagccggttaatttttaattgtccactctgccaatacataattatatctacgatacacggttcggtcagctagctatagcgttatggccttacatagtttatgtttcttttattcttggagattagtcttatactactagggttaactactcattatggtatgtgaaatttatagaggtttactagaaaattataatattggtggtgcttactttgggtaaaaattatcctatagatcgtgatagtagagggcgttacagacactcttttgtatttatgaggggggctactgtagatataaagctactaaatcatgatgatttgttaaaaggtaaaatttcaacaatagaagagtattattgtgttcttgatgtggaggggaacggtgctctgtatcaagtaacagttaatttctctgaagttaaatatataaggcatgaagagtttccaactgttgaagaaagatctcctaagtttagcgaggggaagaagaaaacatcctttgtatttgagattggtgaactgataggttgtgtatttaaagatggtaaggggatcaaagggactttattgtctgaagatgcctattatctttatgttaaaactgaaaaagagaattactatacaatcatgaagggtgctttatcttatgttacacatgtgaagcatgatccattacttatgacaaatgatttctatacgaaggaaatgaaactagctgattataaaaagcctacggagtatgtattttctgtagaggatactattacggtttattttcctagtggtaagaatgtatcaggtgttgtgttggatgaaagtaagtattgggtgttgttgcagactgagaagcgccaactaacgatttttaagggtagttactcgtattttaaacatgagccttatgagacaaaagcctatttgtatgttgggaacagaagtttaagaaaggggtaccgccagcatttcggaaaaaaaccacgctaaggattttttctataaaaagattttgtacatgcttaaacaagcgaaaatgtacatgtttatcttgacatttacactaatttccaaaacttccaccaggacttctttttagctgccctcccaccactatgagaggtaaatgaaggaaaccgatacagcttgtgcgtatgcagtgcattttggtctgggtcacagtcttttaacgtggtcgaactacagggggagtaagcatattcccgatggatccatttctatacctccattatctagggaaatcccccagtatccaagactaaattttacccatacatcattttttgatgtagctcttgaagataaaaactatttaattttcaaggaacagttattaacttaaaacttattatatgaggagggtgtatcatgaaaaaaatatgctttgtattaattgtcgacgctggtataaattatggttcaatattttctctaccatttttaaggaatcaggatgatttgaaggaatatttctctaagtattatgatgtctcaattaattatattagggataaaaactcagttgactatttggtagttcccaaaccgtgtccagcttttgataatgaaaataatcttccaataattgaagtaccagcaatcttatttatggaaaagaattttgaaaaaataaagacttatatagataattatttttccaataactcataaagaaaataaaagtacaataaaaagaagtccgataaaaaacgaatatttctattaatcattcgttttttattatatttacatatattttttaaaagaggattatagacgttctgaaaaaaattaattataacaagaacagtgttcgtgctactatctacggttattttttgtactaagtacccctttaactaacaagacaacaaaaaataattaatatattaaagtgaataatgttactatttttcaaacctaatctagaagacaccggaattctttcggcttcatattccttcatcagctcaaaatcagcctgattattaacatctaactttcgtaaatcttactttttatctatttgacgtatcatatttgaaaccttcaagctgaagctactttcttgcaccttttcaaaaccaaatttaggataaaattctaacaccgtatcattcgcgaataagtatataaaattataattcttctcgtattttttaatgatatgattcattaatttagtcgctaattaattgatattcattcatgataaatcctccattttttattatattttcctaaaaagagtgtatatttcttacaacaatctactactaagttttcgttaatcaccgccttataataggtgtaacggcataaaaacatgcttccggaatcaaaaaacgacaaaaaaaagaccacaagaagaaacatcttctcatggtcaaatttctgtctattataaatacacctatcccgaaagaatagatatcgtgaaataacatgaaattttttgataagatataatgtcttctaaccgctactagtaaaagggtataacaaataaaatcaaggaattgtccttaatttgaccttttacagtataaaattcgtttgaattttaattagcgattaataagcttcatcatatacaatcaaaacctcttttcaatataatttcttactaagaatatctcctttgaaaaccgttgtaaatgaagacataacaaaaaacaagatttatgtccttctgtatcaccaaaatcggtcgtttttggtgatacaaaaagacacatactattattctcgaaaactacagaaaaatccctccgtcttaagacagagggactttctcattcctatttcaaactacctgcaatctccgtaaagataactccaagcgcatgtgcacctgcatcagggtatcctaaacttctttcgccaactgtaccagcgcggcccatgcgagctacgatttctttcgtgtactctgctcctttaaccgctgcttctgcacctttttcaaaggcagtttttacgtctacttcgtttgaggcgctatctaaccaagagtctacacatggagcaagtgcgtcaacaagcgttttgtcaccaactactgctcctctgccgaatgatctctcaccgatcgattggatgccttgcagtgctgcttgcagtatttcagcgaattctttcactgttaactcacgcttctcgcctgctgctttactagctgcgcggaatgcaccgccccaaattggaccagaagcgccgccgcaatgttccataataatcatggagcaaccatcaaggaatgatccgattgttacgttctcttgatctacaatagaatgccactcacgttttaattgcttaaatccttttgctacactcattccgaaatcgccgtcaccagcgtgcgtgtctaactcacagaatggtacttcatttttaatgataatatcgctcattttatcaacgagataaatcatgttgtttaatgtaatgacattatctttaataacagcgtgttcttctgctgtttctagttcaaatgaaacttccttctcttctgtttcttcaagtacatttacatactctaaactttcaactggtccatctactttaaacgctggtgtattacattcttttgatagtaatgtttttaactcatcatctaatttcattacagttaaagacataccagccatatcgatactcgtcatatagttgccgacgaatactctattaattttaatgtttctagcagctaattctcgcgtcactgcattgttaaataagtaaagttcctgcagtggtgttccgccaaaaccgttaactagaagtgcgatttcctcgccatcttttactcctaaatcttttataaggtcatttgtcatacggttcgctagttcatctgctgacaacattttttcacgcttaattcctggctcgccgtgaatacctacgccgtattccatttcatcttccgcaagtgtgaaagtaggtgatccgctcgctggaactgtacaagacgttaacgctaaaccaattgtgcgcacgttaaccgctgctttttctgcgacagttttcaccgctcctaaatccatacctgcttccgctgctgcaccggcaattttatgaactaaaataactcctgcaacgccgcggcgtcctactgtatacagactatcttctaccgcaatatcatcgtccactttgacgtagtcgacttcaattccatcttccgtcgctaaatgcgcaccgtttttgaaattcataatatcgccgctataatttttaataattaataacgtaccttttttactagctgtttctttaattgcttgatatacctgaatttgtgaaggagaagcaaaaacatctccgcacaccgccgcatctaacattccttttccgactaatcctgcatgtgccggctcatggccactaccgccgccactaattaacgttactttgttttcgttcatttctttcttcttaatcactttatattttttcaaaagttcaagctctgggtgagccataaccattccgttacacatttccattactaatgtttctggtttgtttataatctttttcattgtgattatccctcaattcctttaatatattgtgatatatttgaaatcttcttcttactactcatgttaaaatgaaagcgttttatagtaaacggacaaaatggacaatctgtctaaagacaccgctctcatttatagataggatttttatattactaacattctagggatgattcagatgacctcttctataatttctaaaaagataatcgcgaactcattgaaatatttaatggaaacagagtcgtttcataaaatatcagtgagcgatattatgttacactgtcaaatgcgtagacaaactttttattatcattttaaagataaatttgaactattaagctggatttatagagaagaaacgaaagaaaatattatagactttctcgattatgaaaaatgggaaaacatttttgatttattatttgattacttttatgaaaatcaaaaattttaccgaaatgcttttaaagttattgagcaaaactcgtttaatcactatttatttgagcatacgaaaaacttatatatgaagattattgatgaactatctgtaagctgtggattcagcctttctgatgagacaaaaaatacgattgcctccttttatagtcacggcttcgttggaacaataaaagattggattgaaagcaagtgcgaagtagatccttccattatgtcttctcttatgaaaaatatgataaacaatcaattactactattacttgagcaatcagcaaagtaattaaagggtggcaaaagcaatgaaaaagattatgaatgatgtacaacatatcgttcaagatatgctgcatggcttttattttgaacataacgacaaagtaaattacgacgaaacaaataacatcatttatgtaaaggatatcgaaaaactaaagcaaaacgtcgcgattataagcggcggtggtagcggacatgaacccgctgatattggctatgtaggaaaaggtatgcttacagcggcagtaaacggcagcattttcactccgcctacagtggaacaaattgtagcggctactcgcctcatgccaaaagataaaagtattttattcatcattaaaaactttaaagatgacgttgagaactttctagcggctgagcagatcgctaaagaagaaggaagaaaaattgaccatatcatcgtaaatgacgacgtttcaattgaagatgatgcttcttttaataaaagaagacgcggcgttgctggtactgttttcattcaaaaaatacttggtgcgtctgctcttgaaggtcattctttagaagagctaacaacaattggccgttctgttacagaaaacttacacacattaggagttgctctttcacctgcaaacgatccagtgcaaggaaaagcttcattcacattaaatgacgatgaagtgttttacggcgtcggcattcacggagaaaaaggatatcgtaaagaagcactatcctcttctgaaatattagcaatcgaactaatgaacaaacttaaaagcatttatcgctggagaaaaggagacaactttgccatccttattaacggactcggcgcaacgccattaatggagcaatacattttcgcaaatgacattcgccgtttatgtgagctggaaggattacagattacattcgtaaaagttggtacattgctaacttctttagatatgaaaggtgtttcgctcagtttgcttaaggtagaagatttggattgggtgaagtggttgaaggaaagtacggaaactgctagttggtaatacaaataaagtgaaactttaatcagccctcaccaatcgggcttttacgggcagaccgatcctcaccttgaaataaacttttagataactcaaaataacaagcaaaaagtcccttcaaagttaaagggactttttagtatgtagaaattagcctaaacctaagattacatctcttgaaagggggcatttttatgttattcaggtttattgaggagcttttgtttgaagcaactttaaccccataccaataaaaatcagtcctgttatcttatttagaatcattcctaccttttggtttcctcttaatttttttgtaacatatgaagagaaataagcaacaaataaacaccataatagtccagttactgtaaaagtaagtcctaaaatgataaaaggcataggacctgaagcctttgtatctataaattgcggaagaaacgcaataaagaataaagagacttttggattcgtaagacttgttaaaagcccttgtatatatatttttctaatgttcaatttattggacgagacctggaaagctacattcgtcttatcaagtatcattttaatccctaaatatacaagatagataacacctataaccttaatagtgttaaatagcacaatggattttgtaagtataatagataaaccaaaagcaaccaacaacgtatgaactaaagaaccagtaataataccaaacacagaatacatacctgcttttctaccttgtgaaatacttctccccacaatgtacatggtgtctgcaccaggaattaaattcaataaaattcctgttagtaaaaacacttcataattaataataccgtacattttagcacctctatctatttttttggtgcccttattgatattaaattaaataaacgaaaaaagaaagtattttctatttattcaataaaattagcggatttttgaatctacaaacgaaatccagctatttaaaaattcaattactgaagaattctgccctcaatattacagcaaatttacattaaaaatgtaaatcctcatttcctttgtattttcctttattaagtctttttcttatgaataattctgcaacaattaaattgggtacccacgctaaccaagcaataatagcgtaactaagttcaaaacgctctattccaaatagaacgataaacaacggtagccaaattcttaatgtaactgctccaaaggttaaagaataatttctaatcatccaattccgatgctctttaatttttttattcttaactccatgtaacgcttgatatgctgatgttagccaaaatacagataacaaaccgaaacctagcttcgctaccaatcctcccgtagcataaaaagataggtatagtccagaaacgcctcctaataatataccaaccatatagattctcccaattattcgatgacggttgatattcctttctctaaatctagtggataatgtaaaaggaccaattactaatgctactatactagttgtaatatgtataaatagcatcatataccagaacgcacttaatttagatccaaacataagcttcacttttacaagccctgtttgaaatccatccataataaaatattggacaacaatataactagctactaaaaatgcaaaacaagtaactacaaaccaaattttcctgttcaaattttactgcctccttattacattcacgaaaattagattatatatttcttttcattctcgggaaaaatagaaaagccttctttactctctttagcacattgtttttataaaccgaatgacttacatgcaacgacgaataaaatatatgatacaaggcccttcttcatacataaaaaccctcaagtatgtcgttctatacttgagggttttttcatttattctctctcgtctctcattttcttaaatcaataattagctcatctgtaatctgctcaagatggaaaaatctttttatataatggatatcagaccatttttcttctccaccaataataaataattcttgcgcatcatacataaatgaaaagcttggatagaaactgtccgcttttatttcaatcccaccagtacgattactgataatcttacagtctgctgaatagcttaatagcgtatagagagaatcttgtgctgattggaagaaatacttcataagtgtggttatatcatcactattggtaatgcacactttaaaaaagttcgtatcctttttcttattagtaaaaactagctcaaaatgaagtttattctcttctaaaaacccttcaataaagtctctacataaataagtttcaaataacatatacataggaaatttgttatgtgcgcctataaatcctttaataatttcttcaaatcctgtatgctgattcaaattcgttcccactcctatcataatagggtgatttaaataaataggatacggtgattgcccttcatcttttaacatatacactcgtttttcatctgtatgaagagctggtttagactcttttagtaagtattgagataattgaacatttaacacatttacacctgcctatcatgtcatacataaactgtatctattaagttagaaaaaaggatgaacaattcatattttaccgtgtataagcgagaagaactagaatagatcgccggcttacatgtctccaggataataaatgaacatcgcacctacaaatgaaaaaactaaacaaaaaacagcctcgtattttataactaaagaagagttcgtatcaagccttttttcctctcttttacatatcattttaaacattttaaataaaactctatatattacataccccacaattgccccaagggtattcgtaaatacatcatcaatatctgtaattctattatttaataattggtttaactcaattgccaatgaaaaaaagaatcccgcacatacggtgtttttcatttttctaaactgcgaccaaatagtcggtaataaaaaacctaatggcataaacagtacaatgttcaaaagatacgtcgtactacctgccgtatcaaatagagtcaagttgatttgacttacacgaatccacgtttcatatctacttatatcccatacagtcgcgatctgcgtcaccctatacactagcgaaaggtagaatagaaaaacatatacccacaaaaaatgcagaatagatatagttcttttcgctttaaaataaaatccaatttgaaacacaatacaaaacataatagtaaaaaaataagtatacaaataactcatcaaaactcctgtatccatgtagaatcccctaactttacaatttcatctatgactttgttgtttataggataggagaaacttttaaaataaaaagtggggtaaacataaaatttttcttaaatcttcagttgggttttattattactcttcttaggaatccaccattgatagctaggcaacagtatgcttacacttaacaatattatcatttttgcacgtaatcctcgtaatactttaaccgatgaagcatatataaaatcatgtgaatcgtttgttcagttaaaacatgaaattaagaaatatatgacgtactataatcactcttgctatcaatagaatgtacagaagatgactcctgtttgcatacagaaatcatcttttttaggttaccgattttttttataatgtcctttacaaagggtacaaatcaagagcatcttattcctattcaaggggatcaactataccttcctcccttaaaatcactaaaacccatttacgaatctataaaagtagatataatatccttatggaacctttattaatttataaagcattgtcaaatgaaacaagatgtcaaattttatcatggttaaaaaatccagaaaaccatttcgacgaaaaaccttacctagaacaagaccttaactttcaagttggagtatgtgtaggagatatccagcttaaaactggcttagctcaatcggttatttctagttatttattaactatgaaaaaagcaggcttactagagtctgaccgaattggaaaatggacctactatcgtcgaaatgaaaaaacaatacgagagttttctgaatacgtccaaaacgaattataaaatgaaagctaataatcaatcagcatactaattgattattagctttcacacattctgcttttttacaggtatccaatgacttcttataaattgcactgcctgtaaaagcaagaaacatcgaaaggagaattttttttaatatatcatatctagttatttagatatctgttattgtatttcagattacatactcctgataatattggcatccaatcatgcttataataatgcttctttgttaatgaatttactttcaaaatactgatacgaatggagagttttataaatgaaaaaagtaaatcctttacttattctgacactcgcaataggtgtgttcggaattattactaccgagatgggtattgtcggcgtattaccacaaatcactgaaaagttcggaatttcaactacacaagctggatttttagtaagtatatttgcactagttgttgctatttctggtccgtttttaattctgctcgtctctagtattaatcgcaaaataattttattaacagcaattttcacatttgttatttcaaatttaatctacgcttatacaacacaatttgaagtcatgcttgtttttcgtattttaccggcagcgcttcatccactcttcttttcaatcgctcttgtaacagctgctaaacttgtccctccagaaaagagcggtcaagcagttacaaaagttttcatgggaattactgttggtttcgctttaggtataccactaacctcttaccttgcagaccaattttcactcgaaatggctttcttattcggagcattcgttaacactcttgcattcattggaatactactcctacttccttctatgcctgttaaagaaaaaatgtctttcggcaaacaaattcgtatactcggcaaaccaggattatggttaaatattttaaccgtcacattcctttttgcagccatgttttccgtatacagctacttcgccgagtaccttgcaaaagtaacttccatgaatggatctctcatcagtatcatgctattcatatttggtatagttatgattttaggtaatcatttatttggtggtctcctgcaaaaaagcataataaacactgtaatatcattccctattctatattctattgtttacatattggtttattatttaggttcctaccctgttccaatgatttttatagtattcatttggggaatcgtacatgctggtggattaattgttggtcaaacatggttaataagtgaagctaaagaagcacctgaatttggtaacagtctattcgtttcgttctcaaatctcggaattactttaggaaccactattggaggctggttcatttcaaacttaggtattcaccagcttatttggagcggctttatattcacactactctcatttctattaattataataaaactaaaatttttcaattctaatagccaggcttcattatcaagctagtacattttcagttccaaattcgataaagtgaaactttaatcagccctcaccaatcggacttttattaatttcaacgtttagacagatacataactccaaaactaaaacgtttattgcaattatcgatatggaacattttacaaaacaacttaacatggtaaaataatattcggacaggagtccaatattattaaaattaagatggttcaagtcggaggaaggcaccttagggtgtcttttctttatttgcaaatggacctgctcaattattgtgtaaaaaacataaagtaagttgaatccattaaaatacatgagtgaccccttgttttcccctcttattaaaggaggaactattatgggatttggtggtagttgtagtagtggttgtggcggcggctttgctttactagttgtattgtttattttattaatcattgttggagcttcttgcttctgctaaaaaactattggaaaagacactcttatatgaactgaacccaaaaaattagacaaatatattaagcagctactaaggattgaacatggaaataaaaaccagtctatgacccatttttacacgtatctcggctgaaccccgaaaacatttgcttccagccaattatgttcttgttgtggatatcaaaataaagacgttaaaaatctaaacctacgtgaatgggactgtccttcttgtcgtacacaccatgatagggatattaacgcaagtatcaatctaaagaatgaagcgataaggcttctaaccgcaaggactgcggggttagcctaatcaattagagttcgatagaactctttacttaggaatccctcacttctaaacgaagtgaaagtggggtagttcaagacttatttaattcacaaatagaatagcagctttttttagttaattactgttaaattgaaaagaaatgaaattgattaatagtaatcaaatcggttttaatatagtttatttttatgggaatatgaagtttatacatgcaattttgcatacataagcataaattatttaaattaatatataataatataaagtttattttaaagtaatttagataattggttaattatttatctaaaactaataaaggattgatataaaatgtcaagaattagcataacaaagtcccaagatagtataatgattgcatggcaatcagcagagattaccatccctttaaaagatataattactatatctacaaatgacgttcctcataacaagctcgatcatgttgtttatattggaactccatcttcctcaaagaatagaatactgatacatactacaaacttaaacttcattatatttgttgttaatccatctatagttttagaagaaattaatattgagtaataacgttatagaaagacattaaagtataaactaaaatctcatgaacaatcgttgataaatagtcattagcataaatttagtaggggaacgatgtgcctcttgttataatggaatcaagatgcgaaaattatcatttttaaagttggagagataattatggatactagttatagatttagcgtttttgagttaaaacatttattgcatcttatatatagtgatctttgtacagcgtatgatgttgtaactaagaaagaaaacgataaaaagtataacagcactagaatttgtaaataatgctcatagcacgtatctagaatctcgaagattatactttaataaaaagattgaacgacaagaattcgaggactttttttgcaaagttcaaaagattagaatgcgaacttaaagaagttatttcagaagaagataagaacacagcttggctatattcaagacatgaagactttattgaagatggacatattttacttactaaataaagttttacagaaattagaaaaggaaaaaaataaacgtaccataaatagagaagagtataaacggatctttaaagaagtatttgatatttctctgaacaaatactccgataaaattttagaaagaggctagcttaaactagcacatatgaattcacttgaggtagttagtacactttatttgcaatatgttttaagagtgagaaagcataaaattatatctcaccattgtaaagatagctataaaagtaaataatttgtatcttactctcaatagaataacttcccataatattgtattttaagaagtgttaatcttgagaagaataacagatttcatattagggcttaccggtggaattatgggtatcttatttttcatttttactatatttattgataatctaagtaagactctcaaagtagaaggtgcaaatgggataatcgttttaaattggctccctattatattatctgttattgaaattattggttgtttaattgttacatttaatgctaaaataggtgggtttttaatgattattgccgctattggtggtgttatttgtatcacactcttttatttattgccaggtgccctattattaattagtggatcaatgagtattttttgtaaagaaaagcaaaaactcaatgtaatatagagtgatttttcccattcctacttagctaaaaagagaaaaaactgaaaaaacatgtatctaatcagaccagtatcatgcatagtatattggtctgatcggattttaaaaacaattagaagagaaataatattatagcctttttatatggggaaagggctatttgatttatggggagactttcatccaatgtgcatttcttccttttgaaacaagtttaacttcgccggataattgtaaggtatttaatgtcttactaattgtactcttagctatatcagggtatatgctactgatagtttcttgagtaaatggctgtttttggttgtatacaaaattttgaatgcgttcaactttactttgattacatatagaatcttgtattctgttgtgtaagtctttatatgcctctaaaataatagttaagaaattttttaaccagaaactaatattatgttcattacaataccaattaactgaagatttacatatagcattgtagtattctgattgttttttattgatatatttatctaaacaaacatattttacaaatgtatgtccattttttattaataataaatgcattaatatctgagtaagtctaccatttccatggctaaaagggactatgcaataaaaactcaatataaatcgagcaattagtaaaagtgaatgtagctctttatttttatataataaattgtattggtagcacaagtcgtctacagtttgtggaatcagttcatgagggagcggatggtaattggttatgtgtattccgctatctttaaattctggtatagaaagtggtttttgacgccacattccactatctgaggtataaaaattcattacttgaaaatgtaattcttgtatagtttctggactaatagataaagtgcaagatttttgatgtacaacagccagagtctgatagtaacaaaatatcgcatcttccggaacagattcaggtaccttgttattaaaaatgagttcttttattcttttttttgaaatttttttatctgtataaatagtagtataatttttcatgtagtgtagaggtataattttttcgaaattattaaatatgtctggcctctgttcttgataagaagctaactttcctttatactcactaatttcgctaattaagtttattaattgccttttaagttcaacatttatgtacttgtcttcaaagaaatttcgcacgctgtgcctcctattattccccatcaacataacataaaatcatccattctattacaatctgatactctagttctctatttattaagaaattaaattgatattttagctattaatttaattcggacaaaaaatattattctctcacaataaaaaaaaattatattaagatttttatagatataatgttaacacggaatcaataaaaatgaaagcctttccatgataacgtataaagtaattttaatatagtaattttaaataggcaattgataaggataatttagttttagacagaaaagttttttatagtaattcgttttttatcatataattctttgttgcttaattataatatttattgtaattgctgaacaactcaccacgtaacgtcttcatgggtagtttgaagtgaaagattcttaggcacaaagttctatcgaactctaatggaattgggcattcccactcatgaattgttaaatcttaaataccatttttttgtatccataattagaatataatggactagaagcgtcaaatgaaattttaattagtcctgaggtacagaataaacggtttaataaagcgctaatctaaatggcacaagtatggacaaaatataactttaggagacttatataagattgttgttccagtaggtaggcattctgctggtactatgctggtggaattagaagtttgaacggggagagaatgtaaatatttactcctatgacagatagtaaagtaaaatatgatgataaaaaagcaacgattgataccatgctaaaatttgacaaaaatagcaaacacatacatatcaattttacaaggatacattctgacggtacagcttgaagtagtcctcaccctaatcgaacactcattttgctgctaaagtaaaatcagaaaacttaaggaatgattaggggtatttaggaagtagatagattctaaaattacataaaggtaatatccgtgataattttctctattttgagaaagtgtgactcatttctttaaattttgtaacaaatcgccatagcataaacctctatcaaaaactactgaaaatgcaaattactattataaaaatgacaaatttgttaaaaataggatttaggaagttttcttgccatttaactggtaatattgacatgtagggataaaaaattagaaaaggggataattgattatgtttacagtaaaacaaaagctagttaccgtagcaactactttagcattaggctctggatttacttttggaataacacctgcttctgccgcatcgaacgaaacttctacaaatcatatttccatctcgtcttttgagaaacaactgcaaacacatttcacaggttatgttgtttctgttgatagtaattatatgacgattgtggatacaccaacgatagaaaaagctctattgtatcaagaaaattggtgggatttagttaacaaaaataaaatattgctcgttccaactttagataataattcttatactatcggagataaattagatgtttattttaaagcaatgacaatgtcgcttccacctattgcgatgtcacctatcgttgaaaaagtaatagaatagcctagaatactaaaaaagaagagttggtacaaactcttcttttttatgaatgatatccatcaattcaagagtaatcctgtcataagaagcttctatgcgtataatcttgctatttagcagattgatatcagttacaatcatgtaatgtaatttgaaagccgattgccacctttaaaatgaatgaatcattaatattattttatctgcatattaataggacgttcacctatcctatacatattttgcatttctaaaagaaaaaaattagaatacttcaataatataaaaaccaacaactggagcgtaattgatgtatattttttcaacaaacgaaaggagtatttacatgttaactgaattacaaaagaatttcctctcaaaattaaagatttcatcaaaagaaagtatccaatttgataccttgcatcaaattcttttacagatggcacatttaataccctgcgagaacatagacattatggaaggacatcctcaaaaaatttctcgagtaaatcttgaagaaaaattacttctaaataatcatggcggactatgtatgctatgagctaaattcgttattatattattttttaagtgattgtcaatttaatgtttatcgaatagcgggtactctttatgatcccaaaataaaaaaaatggaaacctgatgacggacacgtaataatcattttagaacacaaaaatactaactacatactagatgctggtttcgcttcacaccttcccttacatccggttccctttaacggtgatactattaagtctccaactggagagtatcgtgttcgtaaacaaagtacagctaaaggtacctatgtattagaaatgagaaaaggaaaaaatggagaaacttcacatttccttggttctgaacctagtcataattggcctattggatatgctttttctttggaaaaaatcaatgaagataaagtaaatgatatacaaaacattattataacgaatccagactctcctttaaataagggacatataatttgtaaattaattaaaaacggtcatatttcacttacaaaacaaagttttacacacactcaatatggggagaaaataaaaaaagaaattaatacggaacaataccatcgaattcttcaaacagactttaatatttttaaataaataatattatgttttcggaatattatacagatattcaacgaatatttttaatgtattagagtgttgtgttatagtgcttccgaaatgaagttgcattttagtgaaagcctaataaacgggtctatgcagcatatgtaatgtaaattcaaaaagcatttaataccttttaggatgtatgttttagttatttataaggagactatttttaccttcattttttgcgaaatccctacacagtattaagaagaggttctaacaaaattgttagagcctctttatcttttcgcaacaaaagaggattttaaattttttatccaaactgattgatgtagatcagtatgagaaatccaattccctgttttatgagaaccgataaattcattatagggggggataccaaacaattaagtaagtctcatttttatattatatttcatcaaattgacataacgcttttcctactatattggattgtccggtgggtattgctcctttttctaaaatctcattaaactgcttcaaaaaccatcacactccttcggataagtttaagtatatatttttcaaaagatatactttttcctcttttatagctgaattagaatgaggattttaaaaacaaacgaaaaaaataacctctatacaaaataagagtgattttttaggatggcatattagttatttatatgatgaaaggggtgcttaagagaagcatccaaaatagtgatttttttgtttatattttcaatacaatataatgctttttaataatttatttcatttaaaataccacaatctttaattcttttaaatttatctatcttaacttgttagtaatagaatttcatttttcaataagtatatttttctacacataaacatgtacacaatatgataaattttaataaactcctaaaaatacgtaaaaaagcattggattttgggtatataaaaatataaattcacaataatttagttggaatcttactttactcactaattctaactaagtctatggagtacaagaatagtgggcttatagcggaattaatgaaggtgagatatatcattaaaaaacattaaaaataggtccattatttgtaaacataatttttcatgcatatatgaaaagagatatatccttttatttatagatgtagtctaaactatagttgtgcatgagcctgagtaggaagagaaaagataggcataaaaaaagtggatttctggcatcttaaaaatttatagaatagtggatacagattatgtcctttatacatgcatgagagtatacattgagtattaataatatagtagaagggagtgtagagaatgttagagaatgaagctgtattagtgaaaacatttctagccacctttggtggtttttgcggttactttttcggtgcatgggatgtattattaaaaatcttagtaactatggtctcagttgactacattacgggaatgattgctgcaggttataatggaaaattaaaaagcaaaattggctttaaaggtattgctaaaaaggtcgtgttatttcttctagtaggcgttgcaactcaattagatatgatatttggaagtaatagcgccattcgagaagccacaatctttttcttcgtgggaaatgagttattgtctatctcagaaaatgctgggcgtataggtattccgcttccacaacctttaatcaatgcagttgaaactttaggtggaaaaagaaaacacaataaaaaagaagataaataatgggggaatttagtagacttaaaaaacatggtatacaatgaatccagaccttattatcatttataatgtgtacaatacattaacattgtgcccaaaaatgaagttgcttaaatgattgaaaataactagtaagtttccttctatgcttaaatatcaatttaatttacccttgtaagaattggatatcgtatgcttatttctttcacaaaaattatataggataattctttaaaaaattgttaatagaattaattatttaatatgctcttttagatgattttctctttttgttttaaaatttctatagaagaatatcaacatacttaaaaaatatacataaaaataatattataaaggatgatgtgtttgaagcaatttaaagagatgctagaccaaggagcgatttctattggccaatccgaccaatttggaaaacctttacgtcaatttgatgaagtacaatatggaaatgaagtctatcttgttatttggcatcccatctatagagaatttgtaggttctcatgaatcagggaattggattcctaatactaatttacatcaatctatatggattaagaatttaaaagagcattttgcaaacaaaaaataaaaagattccaacaagtttattagagcctttttgagatactctttagggatttcttcaaagaacgaaattaattatattttatataactaagacataaatataaaaaaagacatcaaaaataataagtcgtttgttttcgagatgattgtctttttacaaacaaaatgcgggttgtaacagattttttacagctcgcattgtattagtttggaacccatcgtacagatcatatattttaaataatccaaatacagattgtggctttatttatattttaaacttgtatagttctttttctttttaaagttcgtgcagatgataaacaattaacaacttgctgatttaacaaagatttgttccatttaattgtaatccgttaagctagtaatcaacgaacactttcattctattttcttactatttgcctttaaaatatgtcactcatacttccgatcattctatttcaaatagttgaagttttctctcttataacttttaaattcacaaaattatttgactcctcttgttgaactatcattaatatatatatatattaatgataagtttaccttatatagattattagtatttttttatcaaactaaaaaacgttgagtacattgggctaaagcttttctattttaaaatatggtgcaaatccctaggcaaatgtagattatataaacatgagaaataaaccagtaatctgaggtatgcattcaatgcaaaatgctttgaatacagaaaacagtatgctataagattttagagcgactaacaatatgtctcaactacatataaaccaatttttcacaacccttatgtaattgctaaatcaaattcaagtaaaaaatataatatttatgtgaaatccatagcttttaagaataatcgttcattaattagttcaggagcgaatagcaaaaatactcctttatagtgattgctattataacaaatcaagttttctactcattttcaacaaatataaaatatgcgtacaattgagattaaaaataatcaagcacatctatatttttcaattgtacataatattggtgaagatagtgcataagatttaattattttagtgaattataaacaaaagtcattataggtctgaaatcaaacgaaataaatgtttaagttttttttgatataactctaattagtttaaaatatattaaatttactgttcctaaatgaggtgaataaaaaatatagcagtcaacaaaaatacgttcatttcgaacgttaattcaaaattaaccataaagagtaaattcttttactcataaaacgtgcagggaaattcttttttgtattgtatctacctgttttctacacatctctaatcgtttttatacttgtaatcatattagtaaccaaaataattcctgcaataccaatggtatctctcaataatatcccttattcctcataaaaagatacaaccatagtatacatatagaacaaaaaatttaaaataacgcatttctatgcgattatcttgaatatttatgatatttgtagcacttttcatttataaaaaagcatagatatcttcctctatagaggaagatatctatgctttttctttttggattagagatatactttactcaaagccgcaggaaaagagttaacaggtgattgaattcaatttcatcaatggaatagggggcaacctgtgtgaaaatgaattaaacaattgttgcctttaataaatggattctctaattacacctgttaatctatgaggaggaggacagaagtagttaagaaagcggtgaatggatcccttaaaaaaattcaagaaatatgatgttgattcttagagcaatgaaagagttattaccctgtttaaggtgtcatgattctcctagaaaagtaggcagatgaagaatggacgatatgcatacggataacgtgactcgtaaaaagtacgcttcgtatatgatatgtatatttcaacgtacagtcatcaaaatgtaacatgggaggcgtgaaaatattgtgatgaataattggcatataccgtttactccccacatagaatgtgcagagcggttttagaggtacttgaaacccataaatgaaagtagaagggggtgaataccatgcatgaatcgcaagaaggtagagatgttccgaatgggataactaaacataaacaccatataccttttcagtgtatcgtttcccttccatcaggttttcaaattgaaaagccgaatgatttgaaacttgtttacgatgtaagtcatttgtctatgacgaaagatacgtgtaaaaaacgtattgagattgatgaatgtggacaagtagaaattgacttacaagtattaaagattaagggagtcctttcttttatcgggaatttttctattgaacccattgtgtgtgaaaacatgtatacaacggtggacagaaatccatctatttccttaagttttcaagatacggtatatgtggaccatattttaaaatatagtgtgcagcaattaccacattatgtcattgatggtgatcatattcaagtacgtgagttacaaatcaaattgatgaaagaaaatccccaatctgctcaaatatctggtcttttttgttttgtgtatgagtaagaaccgaaggtttataaaaaatttaaatatacactatagtgtctttatcaggattgaaagtgaaaaactataggtatagatgttagctagttatcttaataattcaatagtatccaaaggatttaactatgcacgataaaaatagttaataggaggaaaagattttatgctaaaatatcattttcctaatgtatgtgaagatgaattaattaatatatattcttatggggattttaaaggacaaggaaaatatatatgcctctttaaaattgaaaaccaatcattcttattttggagaaacgataaaggaaataaaatatatacaaatttagaatctatcagtgtagaaataataaacacgaataatacgtataatcaaagtcagaatgtatgcccacaagatttagttgatacgtataatcaaagtcagaatgtatgcccacaagatttagttgatacgtataacatttcaattaatggaaaaccgtagagtttctatccttaagttgatgggcatggggttaattcactatgttaaagaaaatgatgtttatgttaatggctcttactctagtttttgtaccaactctcgcttcagctgcaactatagaggatggaaagaaatacaacgcaacacaggaggaattagaagctcaagttaaagaattagaatatattttttcggtacttatggtaaaggatgataaaacaggtaaatatgttcttaataaagaagaattagcgaaatcttcatataacaatgaagaaaaagcagctattatagctggtgtttatgtaatgaatgatgaagaaattccatctaatatgtactctagtaacgtttgggaaagatgttggcaggatgcattaggtattagtaaatcatattttaatcaaataaaatcgtatcttaagaaagaggattactggggagcattgggaatgctttcgttgcttgggctaccatataagcctgcgttgttatttgcttttgcagtaacttgcgggccagctccagcttatattgcacctaaccctcatgaataataagcctgatatcttataagtaaatgaactaaaattagaatctcttttgtaaatctattgatgcaaaagagattcttttatctttttaaagaagtatttctgttaaatatgaaaatattaagtatattctgttgaaaaaaagtagatttgaagtaagttaaactttcatatgatatgcttattctatactaactaattttcaggtgaggagttgatcggttattactagtatagagaatatatataatgtttctgtattcttaatgcttttatctactttttgtttttatctgtatttacgaaaaataaaaagagaaagaaagctcactggtttcgaatttacaatgtatatcataacacaagttagttacattctttggggaatctatattatttatataaactttggatgatattttttgttttatgaaaaaaaggctattaaaaaagggtttgagataaatatcaaacccttttgactatatataattatttcactgcttcttttaattcttttccagctttaaaagcaggtgcctttgaagcggcgatttgcatttcttcacctgtttgtgggttacgtcctgtacgtgcagatctttcacgtacttcaaatgtaccaaaaccaagaatctgtactttttctccatttgctagcgcatttgttattgtatctaaaacagcttgtgttgctgcagctgcatccttttgtgtaagttctgctttttctgctattacttttgttaattctgtcttattcattttttgcacctcttcatatgtaattaggtgactattataacgtgtgtatacttatgatgcaattaatattgtgcatagaaaaagccctagcaagagctaggggacaatttctgtgtggtagtaagaaagaaaaacatgttcatcgtacagtctaaattgtaacatctatattaaatgatgaaaagtacttattctagatgttctacttgtttccacatattctataatgaaaaatatccctctaattcatttcatcttagaaggatatttccaatctttttcttttcgagtatttagagcaggtttagatgaatttgtagaaagtgtttgcttttctattttatctaatctctcatctaatttttcaatagcttcttttgtttccttcagctctaatttaatttctgtcagcaaacggagtattgcatctccttttgtcattttcaacagtaatcgctcccttacttatattaaaagtgttactgtatatagttgaaatttcaattaaaatagaagtagctgcacctagtcatattgaatatccttttacttattcatagatatataatagcattgctatggaatttctagcaatatcaaaggaatagttccattggtttcactattatttctaatcagtgatgtattagccttaaaaagggaaaacgaaaagtcatgaatatagaaacaataaacgaaatgaaaaaataaatatatgagtccaggaagaaaagagcgttatattaaagattataatgcttccaaaaatgaactagaaaagataatgacttacgctaaatttagcttagaagctaaaaaaagagaaaacaaggtaaaagacgataaaggaatttagatatataattgtggtatgacatgcagaaagtagctagaaatataaaaaataaaaggtggtataaacatgaaatcaacaggtgttactagaaaaatagatgaattagggcgaattgttcttccgaaagagttaagaagaacgttaggaattgcagaaaaagatcctatagaaatattcgtagaagatgaaaagattattttacaaaaatataaatcttatgatgcttgtgcaataactggtgatatttcagaaaaaaatatatcattagcacatggtaaaattgttcttagtccagaaggcgctgaacttttaattaaggaaatccagcagcaattagttaaataagaatattcttcttagtacattacaaagaaaaagacatctatatagatgtctttttctttgacttaaaccaacataattttaaaaacactacttttacaatggcaaatatattaacaatacttcatatcacattcattttagcacaaataacatcacgtattctatatatataaatataattcaaggaaaatacataattcctttttaacaattcactgtacttagatgctattgtagagtgtatcatacatagttaataaaaatggtatgatgggaataaagaactatcggaggtattgttgctgctattcaatctccctgtagaaagtagacagcacgcttagaaatatgagtgtaatatgaactataattttttcaaaacattacgacaaggttatggttcttttttacggaaaacttttcctgtgagttgaaaggaattattataatcaaactattttttaatagaatgatacctaatttgaaattaattttagtgattgacacaataatccctagaatgctacggttttaatggtaaagtaataagaggtttaatgtatagagatattacgtatatgatgctaaaaaacgcctgaatactattagtgacagggaatctatattcgcatatcccctaaaattagatatacagataatttgattaattaaaccgtacatatagagaggaagaaagtaagatgtttaaaaaagttacatcggttgtagcttctattataggagccagcctgctactaacagcttgtagtagtgaagagaaagagactaaaaatacagcaaaggcaactgacaagaatgaaacaaaacaatccattaatttaccgtatatagcggagatcccaacaatggatgtaacaaaggcaaccgatagtgaatcaatgaatgtaatgcggaatgtgtttgaaggtctgtatacactaggaaaagataacaaagtaattcctggtgtggcaaaatcgtatgaagtgagtgaagataaaaaaacatacacattccatctaaaagattccaaatggtcaaatggaacacctgtaacagctgcagactttgtattctcctggaaacgtgctgtgaaccctaatacagctgcggaatatgcatttctattctttgatataaagaatgcaaagcgaattaatagtaaagagctacctgtagatcagctaggggtaaaaacaattgatgataaaacatttgaggtgcaattagagcagcctgtcccttatttcattgatttaacaacgtttgcaacatttttacctattaacgagaagtattttgaatcacaaggaaagcagtatggtttagaagcaaagcaattggtctataacggcgcatttacattggataattggaagcacgaacaaggttttcagttgaaaaaaaatccgaattattgggatactaaaacagtgaaattagacgaaattaactttgatattgtgaaagataagtcaacagaaattaatttatatgaagcaggtcaaattgaccgtgtaggactaacaggtgagtttgtagataaatatagaaatagttctgatttcaaagagcgacctgaagtaactatgcagtttttacgtatgaatcaaaaaaatgaagtattaaaaaataaacatgtccgtttggcaattagtcaggcaatgaataagaaagcctttgtagatacagtgttaaataatggctctcttcctgcagatggttttatacccgctgagtttgctaaaggatcggatggaaaagacttcaggaaagagaatggagcattagtaaaagatgatgtgaaggcagccaaggaaaactggaagaaggcaaaacaagaacttgggaaagaacaagtaacactcgaattgctcacgagtgataatgcaatagccaagaaaaatgcggagtatttgaaaggtgaactagaaaagaatttagaggggctaacggtctatgttaaaccacagccacgcaaacagcaaattcagttgcttctaaatagtgattatgatttaggtgttgatgtatggggaccagatattcctgattcgattacatttttagatttgtttacgacagatagtacatataactttgataagtattccaataaacaatatgatgaactaattcatcaagtgaaaacagacttagctggtgatgaaaatgctcgttgggagacaatgaaacgagcagagaaaatattattagaagatggagcagtcgcaccattttatcaaccaggtagatcgtatttacagcgttcttctataaaaggtattgtgacgaatgattttggtggggaatttaactataaatgggctgaagtgaaaaaataagcgaaaaaaaggaatcgaattaattcgattccttttagtttgcatagtaattatgcacaattacatatttaattatcttgttatatcgacaaaaatcgacatttttttcaatacgattatattagaatcgaatataacgatattggatgttacaaatatactgagggatattagggaattcttgtttttttagaagggaaaatattatgaatgaagcacttaagagagaagataaagtttcagaaaaaacattaaacaaattcttgagtaaaattattgatgaaattgatttccaaaggaaaaatcaagaggatatcgctaaaataattggcatttcttcaggaacgctttcgaagaatttaacagggaaaaatcaatttggattttggaatttaattagattattgaagctattgtatgcgggtgatattaataaacaaagaaagatgttacacaccttctgttctgtcacaacaagcaagaagaacttgaggattgccatggaatatgcaaattcaaaaggtgatttatcacttcttaagcaagtagtggatcaagaaagcaagtcttcactcgcaatgaatagagaatgggcctatgtatatgaactagtatggcttagaaatagtggcagtattaaaaagcaagaattgttagctaaactggaagatcgtaagggtaaaaaagtaattaagacaaaagagatgaaggttttatacggcatattaacttactatactatgtatgatttagaaaaatataattctttattcgagtatgctgaggtattatcaccagacgttaatgcgataactgatagttttattagaacatcttatttaggtaggattaaagaaggtttagcatatgcgtacctggtgcaagatgatctcgaaaagtctaggcgtttatgtcaggagattctagatttagaagatcctgaagggtgttttcatcttttaagagcatcggcacttgtatatttagcagagtcttataccttcgaatgctatgagcgtgcatccaggtatataaataaatctctagaacaattagagccatgtaattttgaaagggaacttcaaagaaagcagtcgattcttaatacatatgcttttattaagctagttaataggaaagagttggagaatataaaaatatatcatcctgctgaagaatcatttttagagattgttaaggggaactatcaaaatgcaattgatattcttaataaactagagaagaagaatagatttttaagtccaatgcaatattgtattttaggtatagcaaagaatgatattactttaattgaaaagtcaattgcgctatatgagtgtgttggtaataggttctacagcaaattccctaaaaaaatagtagtagaatttaataaaaatggtataatatatgagggtggtgctatatgaagaaattattatttgtagtaacaagtattattttggcagcaggaattatttatactgctggtagtaaagagcaaccaaacaatttagttgaaaaagattcagaaaatttattagctagaatgggagatcccggtggtggaatgggttaacctttaaataattagaatgcgattgtctcataggaggcaatcgcattcgttgtttttagggatatttcctaaatatcaaattcgaaatacaagaaaagtttgtgaatcattcacaaactgatagctgatacgaaatcaaatttttaaactatattgttagtaaggttgcaaaaacccttgtgttatcaaatctactgataacacaagggtttccaaagattattccgcgagggcggggcactgaaaatgcgtagcccctttatacaggctaatattaagcaagtgcatttaactcacgtatcataaaaaaatactgaaaaataattttacattcatttggcaaaatgcttttttatgaagtaggtgtagtcaataagaacctctaacacttcttgctgtttttgtggaggcaaatcggatattgctactttaattaattctaatttactttcgaggggtgcatttcgcccgaatagttcatctatggagacattatgtatttcagcaagattcatgatggaatctgcatcaggatcagctttcccatattcccaatttgcataagtagtgcgggcaatgtttaggcgatgtgatatatcggattgggtatatccttgtttttttctcaattcagcaagtcgtttgcttagatgggacatatcatcaccttttcctttctgatttataaagttagtgtaaaacagaaaaggtaaattgtgtcctaatgactaataataagtcatattttaaattaatttgtaataattagtttaaatgttatgatgatagagaaatatttagagttctatgagcaaaaaaaacaggaagaaatcgaaacattaaatcgagtttcttcctattatatatactaactaaaataatgaatttcctatatctattgtggccaagttttgacgtcttgtacgctctcttaaataacgttctgtagtcatgatagattcatgccctaaatagtcccttattttttttagttcaatacccttttccattaagtaattagccatgaaatgcctacaagtgtgaggagtgattctatcctgtcggtaacgcagaaaatctaaatttatttcttctatttttttggccacaagagaagagagatagtccgctcgataatttgatccatcagctttagggagaaaagcagaagtactcgatgtgtctagttctgttgtttgtttacgtaaacttcgaacatggcataaagcatccaatgtatcttcaaagatgcgaacttccctacttttattccctttaccaactacacgaagtagataggcatttaaagatgaatgaaagaccaaatctgcccatttagcagttgcgatttcttcaattcgtagtcctgttgtagttaacaggaaaaatgcagtgtaaacaaaatagttggatttttttagttcatctaagatctggttaacttcttctggataaaggtcacgattgaccagctcttctttttttacggatacttttttaaggcgactactaaagttgtctgagagtccgttgttatcgtacacatattttaaaaactgctgaactattgttttctttttacgtaatgtagtggcagcatatttcttacttaattcatagaagtagatttccatctcattatgggataattcctggatggttccaattgattcttttatgtaacgaagaaaatgagaaagatcgtgcagatactgttgtttggttcgctcacttctttttttcgttaaagatggctcatcgtgtaaaaatagataaaccaatgattcttcgcttaattgcgaatagtcaatattacggatacctaaacccataatgttttcaaaatgagagctatcaaaaaaatctgattttgattttacaatttggttattatgttcgtaatttataatattcaaatttaaacacaaccttttatagaatgaaatagtaaacaaatgttttcatatatatttttatgattctaattataccacaataaacagattatttaccgtggtataaacttaaatgattaaaataatatttttaccttaaaatttaatgtttctgtttagaagatatataatggaaatgttaaactcgtttttttgtacatttcaatccaaatgcggtaggaggagatttttttgactcatcttcgtcgaaaaattttacaagaaatccataatttagaagatacacattgttcaatttgccctctgaacaatctatcagtgaattgtacagatgagcaagaacaggcaaaacaaagaaactacaaacattgcaaaggttgtcccattttcgattccatccgagagaaaggagatcaattgaattctttgtcgaaaaagagtacatttaataaggtacgagaacgttatatggaaaatccatttaaatatctgcagtataaggagtactcaatcaaagatgtagtaaaagaaacaggtttaacaaagtatcaactaagaaaatttaaagaacagctagaatgaaagtttcggatgaggtgagatatgagctatttatctttagaagaggtatgcgatcgggtaggtttaacaaaaaatcaattaggttatttaattaagtataaacacatcgaacctatcaatctagatacctggaaagcagatgggggatattgctttgaaaaagaggatgtaaaaaagctagaggaattatacaaagattgtttaacattaaaagaagctgctgaatttctaaacaaatctaagacatacgttcataatgcagcaaaagatgggatattgccttttaaagagattgctaaagggaaatctactgaacgattatacttaaaatcggatttggagattttcaaagaaagaattgaaaatagatcaaaagaggagtcgaaagaaaaaaagcagcatttaagtttataccttgatgaaaaggtattagaagcaataaagaaaaaggccgaaaagaaagggtataatggctacaagaagtttgctgaagacattttaaccgcagaagtaaaagaagacatagaagaatagaaattccagagagaatagacccctaaaaaaacaaaaaacgttataaggggtctatttttgtttttaataaatttataaaccatcaggtctaattgcattgcctgaaacgccaatgacgtttacaagcgaatttgagaggtcgttttttttttttttgttcagtcaaaattgctgttattacaaaaaaaggaactgattataagagaaaaagtttcacaatctataatattgatatttttggaaaataaggtattgtttacttaatagtatgagaggcgttcaatagaagaaagtaatttgatataaaacatagaaaatacattacgaaaaagaaaactttaaatttacatatttatattatagtaaactaactaatatttgatattagtctacatactaagaaacttctttttcaaatttaaagctttaaagctactatcaaaattaaaagggttaatttaataatatcctaatacagtaggggttatggtataatgtagatagtaactgaagacgtgcggtgggaggttgcaccctttctttctcttaattaaagagggaaaggaggtgtaaccgatatggattttttacttcaattattacaagatgctacgaagctattcattacagtattcgtaacaacttatgcaactgcttatgcaaataagttagttaaaagtaataataaacgtaaaagaaccaccgcgtccggcaagacaaaaggtggttcaaaaagaaaataactaaaaacttgcaaccaaccaccttacagcggcagttacatattggacgggatgtttccagcatcctgtctttttagtttatgcaattaagttaagtgctatactttatatacattaaatatgcattcaatatatatctaatctacagtaaacataccatatatttattttttggtcaataaacaagcaatcatgatttcattcaaagtatatgtggagtaaattacaaaagcctaattctattcacagtatactaaaataatgagataagtctcccttattttagtatactgtgaatagaaagaaaattcagaaccgatatagcgatgtttatagtatagaattcattagaaatttatacatcatgtaaaaagtacacatttacgaatcatgtctgtaccccatgcccatcaacttaaggatagaaactctacggttttccattaattgaaatgtttcagcaacactctcacttcacgtctaaacgcttatagagaaacgtgtcgcgcccaaagattgcatcgggtttgctaagcgctcataaaaagaacgatgtgtaaaataacgaaacactaaataacttcccataaagaaagcccctagaaacattgcatataacgccgttgtaatatgattatgcccatcaaaccaatatacgagaaatatagctagtagttgaattatagtaaagcaaataagtggtatatgatcacgtataaacaaccttatcatttttctataccagtatcccaagtaatatgcaatctatatccaacactacgaatcgtttcaatcgcaccttctatatgtaacgtttgtaactttttacgcacacgtgttgtatttacacttaatgtattatcatcaacataagattcactatcccataatttattaagtaacacttctctactcacaacacgcggataatttttcattaatgtctctaataaaatagcttcgtttctcgttatatcaatctcttcatttctaagtttcaatacaagtctttcaggatataaacaaaggccttgttgctcaatcattcgctcttctagtttcggtgcataatctccatatgcacgtcttaaatgactacgaattttcgccactacaacttcataatgaaaaggcttcggaataaaatcatcgccaccattttctaacgccataacttgatccatcgtgccttcacgggccgaaatgaatagtatcggacatgtagaaactccgcgaatttgacgacaccaaaagtacccatcaaaactcggtaaattaatatctaataaaactaactctggttgttcttctaaaaaaatgtttaatacattttgaaagtccgatacaataactccttgataaccatatttcccaacatgtgtcgataatagttctgcaattttcatatcgtcttctacaatcataattttgaccattattgaactcctttttaatccacaatctcaaatatacttatataaaataaatactacctcttttcacaaaatccgtaaattaaaaaaggatgcttttatacaaaagtatcctttttcgtcccttatctatttaatatgaaatttactaaaagtaaatcctagtttctccacataatccatccctaattccatacgcgccgttttcaacggatccacaacttggcaaacttttaaattacctgctgccgataataaaagcgttgcatcagctttagacattgctaattcttcatgtaaaaatgtcaccatattacgtacagcacgatttgctgcatcatctagcaatttttctgaagcaatcgtcattactttttctttttgaatagccattggtagtggccattttttcccttttataatttgaactgttacagttacctcaccagcaacctctactccactaaccccaatttcaccatcccccattgctgcgtgtaaatcacctaacgctaatagtgctcctgggacattaactggtagtagtaatgttgttccttctttaatttctttacagtccatattcccgccgtgatcatgcggtgtgccacatgaaatgctctcttctttcggtgcaataccaattaccccaatcattggattaatcgggatttgtagttcacttgaaaacaaaacatgttcattatgtattgggacaattttcactgtattttcatttaactcattccctattacaccaaggtttgcacctgtagttaaaacgccctgctctgcaattttaatcttttcaatcgttacggctaatatatcgccaggttctgctcctttaacatatacaggtccagtcgctggattaattcggttccaatctaattcttgaaacacaacatcttcagaatcgatttgattttcaaagcaatcatatgtttcaaatacaagactgctcccaatttccacttccatacaaggtttattttctggtgacattgagtaaatgatatggtctttatgaattcgatacataatacctctcccttttatatttatctactattactaattagctctttttatacaagctcctcttaaaattaaatgttatttttatgtaaaaaagcacgcagattgttttataacatacactctttactataacagaaaggtggtatcactatgccccttattccatacaacgaaagtgatgttgatttactagctcgtttaattcgtgctgaagctgaaggcgaaggtcgccaaggtgaggagttagttggatgcgttgtagtaaaccgtgtattttgtgattgcttagattttaaacaactccgtaccgtacgcgacgctgtatatcaaagccccggcggatttgaagcagtacaatatggatatttttatcaacgcgctcgtgaatcagaaaaagaaattgcacgaaaagttttacaaggtgaatggcgctggcctgcacgatgggctctttggtatttccgtccagttggagcttgtccacctgaatggtataatcagccatttgtaggacagtttaaaagccattgtttttatgaaccgagtggtgatgaatgtccaaaaatgtattcacgctagcaaaatttgaaacgcaagtacttagaggtctaagtacttgcgtttcttttagctttattttagaaatctagtaatgagatgaatttttcgatgcccaccacatgtattaataacgatatacgtgggccactagactgattcataatgagcttataaataataataaataattgtttttgattttctttcattatttttttattgtcatgatggcaaatcgaatacaattgctccattaagttagagtaatctttgttagaacgaagtatattgcaaacttttactaaccattctttctgtctttcatctaatgtgttgtaaaactctgtatttctctctcgatttaccgcaattaatttttcagattgaaagttttttatccaatactctgcgcggttacatatcgctatcatagcatctaatgtataacttctatctattttttctaatgtatcttgtaaaatagatgaatcaaaatttaatagcggtaacgttcctgctacttgattaaatctcggatattctttaaactgcctatcaactttagagagtttaattgcatcaaataaatcttcatttttgagcgttttattttcatagctatctttcaatcgttcatactctgtataattacgaatcacatcttcatccaacccaatatgaaaagcagcgcctggtttgtatttggcaaacataaagagaattacttctggtatatacactttcaataaatcgcttggtgtaatgctattccctgaagaactagacattttttcatgattccctttaataccaatgaaatcgtaagcaacgtaatgaggcgcttcacgattgaatattttccttgcaatttcttttgatacattataactacccgtttctgatgagtgatctcttccacccggttcaaaaataacatcctctatcatccatctcatcggccaatcgattttccagtttagtttcattttatttgtatttaatacggataattctttttcatttccgcattcacattcataccggactgtttttaatacttcatcaaaatgtgtaatagttgttgtatcttttccacacctctcacaatataatgtagctggataaaaattgtttcgctcttcttcactacactctccagttttaaaatccattaaaatatcatatatttcttttcgtttatacaaagcctctaaaatatttttgttataccttccacttctatattcatcatgttgataaataaattctacttcaattccaaatgcttgaagcgatgtttcaaactctttttcaaaatgctccgcatacgagttatgacatccatacggatctggaatatcacagtatggcataccaatatactttgcaaaagatggatcaatattttttggaacttttctaaatcgatcataatcatcccacgaaaatataaaacgagtctttttccctaaaccttgaagtgctcttactacgaaataagtcgttacgatttcacgaaagttcccaatatgaacagaacctgaaggactaattccagatgcacaaacaaacgtttctttatttggatgtttcctaattaattcatgtgctacttcatacgcccaatgcatttattgctcacctcaattattttttgttttcgtattctcagttttatgcaataaaaaaactcccacccccaagattattcatcttgaggacgagagttgttagcttcgcggtaccacctcagtttgttaatatgtcaccatattaacctcttcaggtacggcaaaatatgcttataccctatctctataacgggagaacccgtcgcaccatccctaaataaattagttccttgcgcagctccaagtcttttttcgttaagatgtataccgctctttctcagctaccagagctctctgtacgtattctttcttaactactcttctcttccatgccattttaaatattagttttttaatatgataatttataacacttttattgtcaaacttttccgaatcaaaaacatataattacctaaaaaaaattctttatcgcttctaattgaattttgtgactacactcatcacaacaatataccccttttggtttttctttaaatcgcttatatttttcactgccttcgtaaacacgaaatatattcttacaagaaaagcaaacaatctcataaaacatcatatgcattttcctctccttgtttatacacttttttaatcacttgtgagaaggtcatttttctacagcataaattttaatatcctttgactaaaaggtttacctctattcttatcgaattatattaatatcttataacgcgaggtgaacatcttgttcagtaatatagaattagttttagatgctaaagcaagtttagctgaaggaccatgttggaatgaaaaaaagcaacttttatattgggttgatattatggagagaaaattatgcatatacaatcctaccgctaatacgaaccgagtaatttcactcaatcaacaaatcggctgtgttgttccatatttagaggatgtactactcttagctatggaaaaaggcttttattctattaatataaataccgaaaaactgacacatatttttgaccctgaaccacatttaatagaaaatcgtttcaatgatggaaaatgtgatccagctggtcgtttctgggcaggttctacagatacatacggtatgaatactgcaggttccttgtattgtttacatcataatttaagtgtagagaaaaaagtttcacatgtaaatacatcaaatggaattgcttggtcacctgatcatacatacttttactttatagatacacctactaaaaaagtggttcgctatcaatataatatacgtactggagacattcataatccaattgatgtaatcattttctctgaaaatgatggtctacctgatggtatgacaattgacgaagacggctgtttatggattgcacattggggaggttcaaaaataactagatggaatccctctactggagaaaaaatattaagcattccaattccagctttatatgtaacatcatgtacatttggaggacctaatttaacagatttatatatcacaacagccagaacaagaatgactgatgacgaattaaaagagtatccacatgctggtggtatttttcgaattcaaacaaatgttaaaggctgtcccacctattcattttgcaataaaaatattggagctgaaacaatgtgaaccgtatcgattacataagacaagaagaaaagaaatatcacggcctttgctatgaacaatataaactatttgaaattggctcttggctgtacaaaccggttaaaacagttatggacttgatgggtcactttgaaggacaaaacaacttgcaagtacttgatcttggctctggcatcggtagaaatagcattccaattgcacaaaagataagaaatactagcagcactgttacatgtgttgagttacttaattccgctttaacaaagctacaaacttatagcaaagaacatgatgtattcgaggttataaaaacagaacaagcagcaattgaaaactatcatattgactctaacgcttatgattatatcgttgcagtatccagtttagaacatatcaaatcagaagaagattttaaaaacgtacttcattctatgaaaaaagtgacaaaaaacggcggtattaattgtttgattattaactctaacatacaagaaattgatttaaaaacgaatgaagaattagaagctttaattgaaattaatctctcaaccgaagaactgatacgtctattaaaaaacatttataaaggatggaaagaagtaaaagttgaaataaaagaattagcttataatatagttcgtaatgaaagacacattcaattaaaaacaaatgctattacttttgcctttcagaaataatactataaaaggtaaggatattttctcatatattcataggaacacccttaccttttatcttcataatattatttcgttattagttttcgtatcatctaaaatataattttcattcgaaatactaatcagctattaattgaattcattaactggaagaaatattccgcttcatgagtctcattcagtttataccatgaatgaagtgtatccggcgcaaatacatctaattttctcaatacctccatggcaaattctagaggagctacacccgatgcggtaataaagttttcactggatgatacaggtccctctttataaaaattttctcctttataagtaggacaaaccattttcatatactctaaactattgcttgtgtgatttatagaatccaagtaaccgtaatttgcaagacctatagttgcaccgcaaatggcagccacaattgtaccaagttttaaagcctcatcaactttttgcaaaataggtttatgtatttcttcactccaagtattccctccaggtaaaattaatagatcgttactctcaaggatacattcatctagggaaatatccggctgtatattcaagccccccattgaaataaccatttctttatttattccaactgtgactactttaaaaggcgctacatcttttttaaaatatctccctgtattaagttcagcaattaaatgtccgtactcccaatccgacatcgtgtcaaatacatatagataggcttttcttgtttgcattcaataacactccattcatatactacagttttaattacaaaaattgctcttttcattttaacattttattcaatatttatggtttaaaattccaaataaaagagcacttgtttccgcaagtgctctttttggggattttgagatatcctattaaagaaagttaaggttacttaaagttaataggtacttctattatatgcttgtcctttttatttgtgcataatcaatatataaatatctttaataattcttaataacttttaattatagttctctcttacattttatcgttaaaaaattggctttttctcacgagaaattatctttttatattgtacctatctaatactttttctaacatttctaaagttattggttctgcttcttttattaatcgataaccaatacgcccattcggttccgctgtaacttgctgtaaactctttacatcatggatccctttttctcttaattgcatatatagttgttgctccgacatttttgcctgcatcaaattctcttttacaatctctccgttttcaacaattataatgctacttccatttagaaattgttccaccttctttgatttcaattcaaagaaatgaataataagtagtatgcttgcaaatatgatggccgcaaatatagatgggactacttttctacttaatacaggttctacaataatacggccgattgatacaactataatgatttcagctcttgtcatttggctgacagatgcactacctgtcattttcaagacaattattccagtaaaagttaatataatactttcccaaattatattcataataacccaatcctttaatggtgtattttactatcattcccattaaagttgtgttttacttacctattaagttgttaaatccttcagaccatgatggaaataaaggtatccaaccatactctttacgtgccttattattggaagctcctctttcccaactatttttcccatcttgaactttaggcttaggtgcccctatcgctgctgcatatattggtaaccattctttactagttgctggataattatctacaatatttacgattcctgaaggccaattaagggctagcatagtagctcttgcagcatcttcgacatgtataaacgagcttatcccgtctgatgcgataatctcattattacgaacttgatttgctattaatccgttttccgcataccatgttcctggtccatataatgtgccataacgaagtataaccgattcaggtaactcagtaacagcttcttctaattttaatatgccattaacagtgacttgccgaggcgcggaagcagtaatatgtagtgaatctttttcagtcgtaaatgtatcccctggttcatacgcccatgaaatactttgagcgattattttctgtacccctacatttttagctgcatcgacaaggttacgagtgccttttgttctaatttttgcattatcctcaaaattccatgatgacaatgacgttaattgatgaataactacatcgggatttgtttcttctaatacagaaaatacagcctctctattaaatacatcagctattactggtatggcaccaacctttttcattgcttctacttgcgaagtattacggatcatcgcaaacaccgtgtgcccattttttattaacagtggtaataaagaacgtcctattacaccagttgcacctgctacaaatattttcatatatgttcctcctcatttagtaatcataaatgtgacgaaacatttgtgaggtatgtgacaattatttaatctgtgtattcattttcatgtaaatgtgaattaaaatcccaatatccctggaggtgacaaggatttatgaatattcatatttatacacttacgcaatacagagctacactatatattaattaaacactaataaaacctatttttttctcagaacctcctcatttgtacactctttttttattttcaattaacgtttaaataaaaaaacgtataatccgcatcattgccaattttcatatattaaatgcctacttcatacagtaataaataatgataaaagaaaacagagggtggttgtatatgacaatgacggatatttataactttatgattaaacatggacgtatgccacacttccacgatgaatttccgttaattttattctggagccaaaaaagtggctgcacttcactagcaaattggttcttttatcaaattggattatatgaagaagcgattaattacgatccgtttattcataactacgagtatgatatatacaaaaattcttttttttactatatacaagtagctacagaattaaggcttaaacaaaaacacgcgtacaaacttgttagaaacccttataaacgagctgtcagttctttcttatcactcctttcaccaccccatatagaacatccggaatggagacctattcgtcaatttctgtacagggatgagaattgtaataagaaaatctcctttaaactttatctatattatttaaaatcttttgattctaattcagacataataaacccgcactatgctccacaatatatacaaaatgaagaacgttttgtaactaattatatctacctagaaaactattctaaggaaatcgcgaaactagaagatcaatatggattaaaaaaatctcctttagatttattggaaaaatcatggcaccatcagaacgactatgctatttttaaaggggactacgcagacgctaacataatagaccccttatttccacggctcccaacatatgatagtttttatgacgccgaaactactcaattagttgaagacatatttaaaacagattttaccatatacaaatacccctttacgccactttaaaatatataatttcttgaatttatatattcagaatatacatgctaattaaatgggatggagcacatataaaaatgtgctcttttatcaaggatttattaaaatctcatattacaaccaacatagtgaatccgaatattatatatttaatgcagaatcttaaagcttttccttataatgagtaaactaaaagaatctcaatcggtcattctaactagccaaccatcagtcttaaatacaaacttatctctgcccttctcaataagtatattattggggtagagacacatgcccatcaacttaaggatagaaactctacggttttccattaattgaaatgaagattttgtacatgcttaaacaagcgaaaatgtacatgtttatcttgacatttacattccagatttacaatgctataagttttatttaacttcatccatagcaagtagtatggaactgatatatgcgtttcagaactaaataattttcgcattataatatcacctctaaaggtttgttaatttatacattcctcttactaaccatctgtatctcttcaaagatacaaagtaacatttcaattcgtttgattgctggaaagtatgtgtcatcatcatagaaaagatagattttttcctcttcagcttggtaaagcatacgtatatcaaactgattttggattgaacgaaagaaactttgatcctttatatttatattggaaaatatctcaccaattggactccatgcattatcaacaatgttgtttaattcatccatggatatatgaaatagattcgaatatttgattagagtatctttatcgtcgctatctacctcttcgtgatgtaatttcatatcttgaattaagtcatcaccccagcttttaaatgaatcctcacaatcgtattcttcgaaattatcttgttctaaatacgtcgggaaataagctgatacgggaattcctaatctatacatacgcataaataactccataagatacaattgcgatgtatagaagcaggaaagatcagtatctaaagagttttccgcaagcataattatttcaagtaaagttttcgaatcaattaaatcaattgggaaattggagtcttcctctaaataagaaacggcagccattacttgttgaatggattgttctgaaatcttgctgaagtctatttctcttgagtgctctaaacaatctaatatgtagatttcttcttcatgtttcttatctgcaagtaagtcatgcagtaagtgagcatccttttgtatttttaacgaaagtagatactttcttactttctggtgattgtatgtaaataataatttcatacctggttccccttcgtcttttctcgaatcattgccgcaagacggattataatttcataataagaaagtacccattcatcaaatgagtactgttcataaccatcctctagaaattcaatcaaaatatggctgggatacgcttcactttgataggtgttaaaagaaaattcatgtaacacgaattgaaaatcagattgtgttatatgttccgagcctatacataaatagtaaccagctgtatcgaagtaacatccttccgcagccatagaactaatatccgaagcgaaattcgaatacatgtcttctgagctaaataacgtcccatctaacaggtcttcttcagttccaaaggcaaagtgacaaaatatacgtgtttgctcattaaaacgcgcaagcgattcgaataatagttcacttgtgatatgcaacttgtccctgtgaaaatcattgatattgattaagaatgggatgttatatttgcgaattaatttttgtatgcgtagtatccgaatgtatactttcatctcatttccttgattaaataaatatttcatcttctagcccctgcttttctacatcttctagttgttcagtgaaaagatgtaaatgtagcatttcttttaattcacaatctggaccatttatacgaaatgaattaccactataaaacgtgacataatgtcgtagctgctcaaattgcttttcaaattcatctatatgttctaatggtatgttttctaaatcaggcatttcattcgcaataaatccatttataatcgattcaaaggattgacgaagttcttgattattaagaaggacttcttttgactgtaataagtcaaagaagtcactgtgattcatactcatttggatgcccccttacacacgaaccggtagaattaactgcagattagagttagttttgtcatctgctcccactatcacaataggtctctggttattaattatttttatcgtgattgcttcagacggtattgtctgtagtgcttgtagcagatattccacattacaagcaaacgtaaatgtctcttcttgatcgcatggaatttccacactcgcagttcctacttgtgagttttttggttcaattcttaaagattttgttccttctgaagtaaacattactaatgtcgagaatgccgacagctgttctaatgtattttgtaactcgctacgttctacagttacatagatatctgagtaatcgggtatcatccttgatgtatcaggatatattccggctaataatcgagattgatagataatgctctcccctcttataagaagttgcgtgtcactaatcaatttcatttctaatttagattctctattaaatagttttaacgccgttttaagggatttacttggtaagatgacttcaccatctttagcagcaggaatatgcgtacgttcaaaacgtaacctcgctaaacgatacgaatcagtagcagtacatgatagctcaccttccatggattttaaatttaaacccgttaaaatctttcgtgtatctgatactgcaatagcatgtaaggttctactagcaatttttgcaaattgctcttgtgtcatcgttatccagtcttctcctgattcgattttaatttcaggatattcttcatgatccatggtacaaaagctaaattgtttcttcgtattttctacgattttcagctcattgtttgtatgctctaaaccgatgaattcacttttgaatttcttaatcgttttaagaaccggagcggccgcaaaaagcaccttccccggttcagtacaatccccactgtttacgttaaagcgtgtcactaatgttaccgtctctgtaccgtctgaacccattagaatcattccttttgaattacactctaataaaacaccttgtaatgctggcattgggcttttaatgtctacagtagcgctagctttctctaatttttcaataaataaagtacggttaattttaaaattcatagtaaatccctccaaaaaagtaataaaaaaagaacagacctcatatcctgttcattcgtcttcctgctataaaacaaagctttacgcgctttgttgtttttttaactgttctatgagttggtgaatggcttctgtatgatcatgaagtaaccactctctaaaggacgtaatatcgccggatatataggtagataaccagcggctaagctgtttttcattcccatggctaatatttatggcctcatgaatccactgcaaacgagttataatatcctctaatccaccagtcgttgtatcttcgaatgttctagcctgtgcattatgattgtgattataggcaagcaaaacatccctagatgtaattcctaacggtttaactagctgttgcatgtctcgaattaataaccctagacttggttgggcatttgatggttctttctgtgaacaaccttgtttattcttttgctgtaacatggtaggtggtgtgaaataataccctttcttttgataagaaacatagatatcatttttacccttactatgtgtagtaagctctactttatgtggttttatattatataaatatcttcccacgccccaaaggactgctgccctttttaagctattggaaaatccaccttttacagcattgtaatcagattcttcactgccatcctcttttgatatccaacgttcattcaaaaacactgaaatggtacatttcgttgctttctcaccccatttttcataagacacttgccatttatcaataccaaagacttcatcaaatcggtcctgaatggcgcgtgcgtcaacaaatggagctacatacgcgaaaaaacgcccgttgctttcgaatgtatgtgtaatcttccaacctaattgttcaaatggaaattcggcttgtaaactttccatattcgtcataataatccccctacattaattggtatttcgaatctgggtgaatcctctctttctttcgaaattcatcaatcatttcacaaataatccctctattttcatgaagcagccaatcctcataggaagtaatattctttcccgattgaatggataagcgctgattcaacacttctatacttgtatgactgatattccttgctgcgtaaatgagacttaagcttactttcaagtcccttaaatcagaaatagtaatatctttaaatgtcgtagctttcgtattgaagtttttattgtgcgcttgcagcattgatacagaactgatccataaagggttagctagttctttaatttcttcaataatgtcatgtaaatgagcatcattttgcaattttctttgtgattttttcatgatgtttccccctaagtaataaaataattgcctaaagtgctggctatacaataactccaaacttgaagacaacacaaaaagggcttcttcaagtcgattaaaaatgtgcatagcaaaataagctatatatacactaatcggctcaaagaagccctttcataaatgaaacaagacgcaacttgcttctacaactcaaccacaacacaaaaaaggtgtgggaataaacggaatcaattaaacaataaatatagttatatattaatctatttttatatcatattcaattgtttttaagcaaacaaaaataagaaggaaaattatatgtagtggttttatgtaccatataataatacctctgtttctacgtttataactcccttcttattttcagttcttggcgttacttcatgtactgcaattcaaaataaagtttttctggcttttgcttctggtctaaataacaaagtatttctggaatggtttgttcgtctacttccatactttccatataggacatactttcactttcttgaacatttttaaaaatagaagtaggtagtttttctgcagcaaacacactcattttgcttcctaacttttgttcggatgcagcgttgtagaaaatttcgttcacaatgacctcattatcatctggatcatacatgtaccctcgttgtatacgtagcaatgctttacccctttcaaatatattccttcacacaaatggttatatttgtatatattgttattttgtataaaggtgtcaaagaatattatttcgtaaaatccttaatttgtataggggcagatataggataattaactttagcatattatttttgagtatttcattccttttaaatctacaaaaaagatacttaaagaaaatctttttgattataaatgccattaaaattatttgaattatgcaccctgagatttctaatatctccctgaataaaggtaaaaaagccaaccttaagtgcttataaggatggcttagtttgttgtaaataactttgtatttaattgcttaatctccccttctgcaagaggctgatagaatgcatgttgtaatccttgtacatgtaaggtctcccctatacataataaaactctaccaggaattaaatctaataacagttctttattaatacgctgtgcttgctgaatagtagaaacataaacaactaaaattgtagggttattccccaaccccctcatgataatatctttacctgactctacgaaatctttccatctagcaataatctttttcaagcgatcctttttatctgttaatagggtggagtagacaacaaaattaaactcttgatttactcccacttgcactgaaaaacttaaaggaggggtaaaaacccctttactaatggatggatgcataatatgccctaaaaaggatggagcatagcgtagatggcaaagcagatctatatcatgccaataacgtaggtgaacatatttaccgtgattatcaattcgctctggagcaaagaaaaacatatttccttgccagtattttaatagcttataaccattatcggataacgtatatgtttcttcaaagatctccatatcaaaattctcaacttgccatttttcaattagacgatagtaaagtaatccttgaagtgcatcatttattttcttacgtgaatatctatccttgaataaatataataaatgattaaatcgaacggatgtatgaacaccaatgaaagcaagtatggcatactgttcttctgttaaacgctgcttaaacttaaccaattcgtcaaaagaatggaatacatacgatttatccagttcatgtattcgatatatttgaagtccctgtacatcctcacttgataaatgaggaatagaagggacataagtagacaattgtttctctattgtacacatagtcatccattaaaattggaaaattgacgaattagattttttactttgtccctgcggataatttaggatacgcactgttccttttctatttttggcgtcgatattaagcagctcacatgtaacaatcgtttgattttttgcatcttctatagttggattggcaagattacggctcttaagtcctttaaactgaatacctggtgcaacctctacgaagatcccagcaatagcatctacccctactattttacctacaaagcgatcacggcgtttctttagttctaacagtttttcaattggatctgtttctagtttctttttatttcctctaaattcataacggccatctttttccactactttatcgatgataagttctactacatcaccaatgacgatatcctccggacgaacgaatgaataagaccagtgtgagtaccttaccccaactgttacgccatgaatttcaactaagacagtttgtgcagatgggatatgacctgatacggttcctgtgtataccttatttccttcttgcgctgttacttcttcatataatcttttttgaagtgctaactcccctgccgtgatagatacaacggcaaagttcccttcttctgttttttggaagtgttcaataataacaggctttgttctacccactaaccattgagggtttttaggaacgtttatacctgcctctgtaattggacaatatgctgttgtatgagtaccaatctgcattgtaagcacttgtatacgctcagactttccgtttttagtcgggaatagtttttcagatacgactgtaattaaacctttccctacagtgcgttcacgtttcatgcgggccaattcttctaattcatgttcacgtactcgctcgaagtgattaaaatttgattctaacagtgtgtcaccgtgtggattctctgattcaaaaaccattccaagttcttctacagtttgagtgtttgttttgtcttctgccattacatttttcctcctagaacgtaaaaaaggacacacctgtaccgttgggatggtacgtaaggtgtgtccttcacgtaaaatatgatttatttatatagttgttaatataaatataatggtatttttactcaaatgcaagaataattttagattgattacaagtggattttggggattctaattatagcagtcatagcaaccccatccttaatgtgcattaattaaaaatgcgataattgtaattctcgatttacacgtgcgttttcactacgcattctaagatttttaactgcccattcatcaatgccaaaatatctacataatccattaataatacatttctctaaaatcaaagcacaaagttcagccaataatattacatctctcatttgaattttgaacttattttttattagatcataggaaatgcttatttttagttttctaccaagttgtaagatatctctatcatacttattatttctatgtacaatattatctcttaatctctgccaaaaagtaagtaactggtgattccttgttccgataatgaaatttttttctctattatctatatatttctcaaagaaattaaggtactcattcatgcaagaattagacaggtctaattctttggggagattagaatcaaacttagtgagtacatcaaacaaacttgctaaggtttcctctagtctgcttaataataatacaagtgttgaggcagcggatgtttctatttcgaattccttttcctttaccgcactaaaattggctggcccttgttctaattcttttgtaatacgctgctcatttttttgaaaaagctttacaatagatgaaaattcattactagaaacctccattatttcagttatttctaatgattgttcagtcgagaatttactcttttcatttcccactagtattaagcacattgctgatagatacatctgttctattgccatcacttttatatattcatttttcatcacttatgttcacccgattcaatttatttaaggaattataaaaaaatttatatgtagtgattttaaaatatataattagaattctcaataaaaaaacatagtctcatatttgaaactatgcctttttaaatttaaagtatgcagttatctcttataagaaaatctagaatagtttttctaaccgtattctgctactttttgtatatttaccaacctcaaatcaaaatctagaatgtagttccactagatttaatttgaggtttaaaaactattaatcaaagaaattattcaattctttactcattgcgtttgatgttttttgctttggtttctcaattttattaagcgttggctgcgtagtattatttttatttttttgctgggattttaagcgctcttggcgttctttgtaactcatacgcttatgttcaggttgcttttcatcatttctcgaatggtcttccttatttttttctaagttttcatgaactgtaatactaatagattcgtaaactcttgctacatcttcatcaagtttattttcttctgtataattaagcgtttcagtaattggaatcgtattgatttctacatgtgtttcgtctgactctgttgctgtagctgaaattgaagtagattctatatttgtttccgcagtctctataattggaacgggaagtccatcagatgggaattcttctagtagtggttcaagatcattgggaatcccggaatgaatgatggaatccttattccagtcttgctctagcatagtaatagataattctttgttcagttctgctacctccatatttatatcatggcaatcttccatatgaggtaattctatatctatactttcctcaataatttcttccgctactgcattttttatatcatgactcacacgttctattggcatttcttctactaccggtatttcgctatctcctggttgtttcacaaagtctgctccatcattacataaaatatctttaaatttgtttttcttcttttccgcagccacgctgtcttcgattggaatcgctaccccttgtgagatagtattctctgaatttttatctaatgaatgagtagcattaacagtgggaccttttgctaattcgggctgactattatgatttgaaattaaaactttacgaggaccatcgcctgtgtaagaacttacaactagattttgttctaacttctcaatatattgcatagccttcatatagccaatcctgaattttctttgcagatgagaaggtgagatttgttgtgattcaataataaattccttaatttcttcatacaacttattttcagccccatcatcaatatctatctggtggttcatagttgcaggatcattagatagaatttcatcttgggacttgtgttccttataatcatccaatgatacaatgtgttgttgttcttcgtttatttctatagagctattctgtttgatctcatcctcttgtataggcggcaaaggttgtaatttcttcatgttctctgcgtctacatgcttcataggatttgcttttgcaatagattcattaataagacgaagacgttcattttcccaatattggcctgttcgctcctctacctgtattagtgcatgcgcgaattcttctttaggtacaaagttactcgtaatttgttggacaggttgcacatgattatcttgtacaatacgagctgcacagatgaatgcaccttgtcccataatatctcctggtgacataacaacttcttttgctttctgataggttgatcctaatcgactaacaggattgtcttgcataggtgaaataccttgttcagattctgcctctttaaattcttctttttcaccaaacatatctgaaaagatttttgcatcatatggtgttacatctccaaatatcattttattacggaatgagcctagtaaggtaaacatgtattgctctgtgaagtcgagagctaattgagatagtgtttggctagcaattgttagaattactttatatttacgagattgagcagggaattctttaaacggccgaacaaatgtgtagcatcctagcccgagagggctggggtagctactaacccttacggtttctttttttatttggtatatgctttacttgtaatcgaaaataaagcactaataagagtatttataggtgtttgaagttatttcagttcatttttaaagaaggtttaaagacgttagaaagttattaaggaataatatttattagtaaattccacatatattatataattaattatgaaatatatgtataaattgaaaatgctttatttgacattacagctaagtataattttgtatgaataaaattatatctgaaaattaaataatagtataagtggagggattaatatgaaactaaagaatcaagataagcatcaaagtttttctagcaatgcgaaagtagataaaatctctacggattcactaaaaaatgaaacagatatagaattacaaaacattaatcatgaagattgtttgaaaatgtctgagtatgaaaatgtagagccgtttgttagtgcatcaacaattcaaacaggtattggtattgcgggtaaaatacttggtaccctaggcgttccttttgcaggacaagtagctagtctttatagttttatcttaggtgagctatggcctaaggggaaaaatcaatgggaaatctttatggaacatgtagaagagattattaatcaaaaaatatcaacttatgcaagaaataaagcacttacagacttgaaaggattaggagatgccttagctgtctaccatgattcgcttgaaagttgggttggaaatcgtaataacacaagggctaggagtgttgtcaagagccaatatatcgcattagaattgatgttcgttcagaaactaccttcttttgcagtgtctggagaggaggtaccattattaccgatatatgcccaagctgcaaatttacatttgttgctattaagagatgcatctatttttggaaaagagtggggattatcatcttcagaaatttcaacattttataaccgtcaagtcgaacgagcaggagattattccgaccattgtgtgaaatggtatagcacaggtctaaataacttgaggggtacaaatgccgaaagttgggtacgatataatcaattccgtagagacatgactttaatggtactagatttagtggcactatttccaagctatgatacacaaatgtatccaattaaaactacagcccaacttacaagagaagtatatacagacgcaattgggacagtacatccgcatccaagttttacaagtacgacttggtataataataatgcaccttcgttctctgccatagaggctgctgttgttcgaaacccgcatctactcgattttctagaacaagttacaatttacagcttattaagtcgatggagtaacactcagtatatgaatatgtggggaggacataaactagaattccgaacaataggaggaacgttaaatatctcaacacaaggatctactaatacttctattaatcctgtaacattaccgttcacttctcgagacgtctataggactgaatcattggcagggctgaatctatttttaactcaacctgttaatggagtacctagggttgattttcattggaaattcgtcacacatccgatcgcatctgataatttctattatccagggtatgctggaattgggacgcaattacaggattcagaaaatgaattaccacctgaagcaacaggacagccaaattatgaatcttatagtcatagattatctcatataggactcatttcagcatcacatgtgaaagcattggtatattcttggacgcatcgtagtgcagatcgtacaaatacaattgagccaaatagcattacacaaataccattagtaaaagctttcaatctgtcttcaggtgccgctgtagtgagaggaccaggatttacaggtggggatatccttcgaagaacgaatactggtacatttggggatatacgagtaaatattaatccaccatttgcacaaagatatcgcgtgaggattcgctatgcttctaccacagatttacaattccatacgtcaattaacggtaaagctattaatcaaggtaatttttcagcaactatgaatagaggagaggacttagactataaaacctttagaactgtaggctttaccactccatttagctttttagatgtacaaagtacattcacaataggtgcttggaacttctcttcaggtaacgaagtttatatagatagaattgaatttgttccggtagaagtaacatatgaggcagaatatgattttgaaaaagcgcaagagaaggttactgcactgtttacatctacgaatccaagaggattaaaaacagatgtaaaggattatcatattgaccaggtatcaaatttagtagagtctctatcagatgaattctatcttgatgaaaagagagaattattcgagatagttaaatacgcgaagcaactccatattgagcgtaacatgtagaattaaaatctacctaaatccagaaaaataaaagggttaaatatacaattcttgtaccaatattttgagtgattagatgtaggatgaaatttaattgtatgctatttaacagtagagatattaaaaattaatttatctatacattaatagtatagacatacaaacataagagagcattgtcttttcgtaggctacaatgctctctatttactatttatttttcttttgtatcttcaaattgacgttgttctaagcgttctattgcagctcgtcgtttagtatcatcaatgtttgtataaagagatgttgtttccatagaattatgtcccatttgatttgctaataatactaaatctttattttcattatagtgattagtagcataagtatgacgtaatttatgagggcttttcttttcatcaaaagcccttgtgtatttctctgtaagcttttgtatagcattaacagaaatttgcgcataggatcctttataatttgttacaaatagaatatcttcagcatcaggacacttgtaacgagcagcacgtacttttagatactcttgaacatcatctagggctgtttgtgtagccaaaatagatgattttttatctccttttcgtacaactttaatgtaacgagtacgaaaattgatactagaaatagttaaactagctgtttcagatacccgaagtcctgtacctaaaattaaacttagaatagcaatatcacgctctctatcgcgtttgaagaatcttaacttaccgggagcgttttcttttagcatttgctcatattcattagataaaaagcgcataaatttaatatcatcattattgtgaaaaataacttcagaaatttctttcgctcttgctgaagcgtcaattttttccttatgaatttccattttggccataacatttctataaaagtaacattctccattatcatcttcagtgtttttggttaggtagttaaataatgattttagagctgaaaatgttcgtataattgcctttgttttattaccttgtctctctaaatagcttttaaacctttttacttgtttaagaggaaggtgttccaatgtttcaattggcacctcatgtaatttcgtaaccgttacaacttctccatttacgaaaacaagacgagaggagatcaaccaatgtaaaaacatttcatattcaattaaatatccatacaaagtagcaggggagaggttcgttttctcttcaatatattcaatgatataccaaggcattttttctttatgacgttctacacgtgctttatacacttgtttttctcgattgctcaattttttcacctcaaacttcaaaacagtacattgattttctataatcaatgtactgttttgtcttaatttgtctaattttacattaaatacaattttaattgatattcttacgaaaacaactttatatagaatttccatttaaattaacttttaaaagtctttaatttattgcataaatatctctagatgctgcattgtcttttttatatgattatttttaaatacgtgttttttacgttcattccaactatggatataattgataatctcatcgaaatccattattgaattatttccatactttatagaccaatgtacagtagctaaaagctccataccataaggggtttcatatccttcaattaaattttttacctcttcaagtctttttaaagattcttcatcatgagagataaactctttagcttctaatattgcatcttcaaacagattaatatcagatttagaatttcgatcaccataaccacgaatataatgtccttctaaacgaattaaaacatgatttaaattttccgcatatggaccatatatatatttcacaaaatttaaacgaagaggctctccacactcttgtaaaaaataagctaatttctgtatttcgagaagcgaaaggtgatatcctggagctctgtattgctccattaataatagtaaaagagctcttgcttttgtcatttttggcttagttgtacctattttcatgctatttggatcaggatgaccagaaggttcatatagataaactgtagtatttaagtcctctaatgactttataattaaaggctgtacttcactccaatctaagcccccattaccacatccaagaggaggtaatgcgatcgattttatattataattaataatttcatttcttaaagaactaagcccactcttaatatcttcaattcttgatttattcttccaatgccttttagttggaaagtttataatgtattctggtgatcctaagaggtgtgttttatatataaacattttcccaggctgaacttgattaattttacatgccttctgataagctttaaaattatcagggaatgcttgtttaaattgaagggcgataccttttcccattacaccgactgtattaacggtattcaccaaagcttgtgcatcagcttctaacaaattgccttttgttattttaatcaatttctaccaccaccttaataataccaattaggttttaatttaactgttaaagaaacattatgttcagttaatattttttcggtttcttctttatatttttgactatagactgcaatcccgataatacagtcaagtgggacatattggtaaaccagaaactctgccattcttctacgctttctatcattgtcttcaatcgtgtcatgccaatatttactcttcattatatcccaatcaatgttgtgcaattctttaagatcattgtaatactcagtgaagtgcattattccatggccatcagtaaaacaaaaaggaaccccgttttgctttattttttgcgctgacgatacaaaataaatgagaggcccttgcccctcattatattgtgtgacattacctttatagatactgtataacataggtgattttggagcgaaatagaatggaacatatttatgtaatgttccaaatggttctactggaactgagtaataagctcgtctgttttgtatatcattattagcaatattacaatatgtttgcccattattcatgatgctagagacacacacgagtccatttgaagataatatttttgataaatttctataatgagtcatatgatatataaatgtgtttgaatgcattatgtacctcacgatattaacgtttaattttatttatattataacacactataattatcaattaaactcgaatttaatgtaaaattatttcttaatcattaacaattcatacagcctgtatatagcctccccctttattctttcatgtaagtttcttctcacatataacacgttcatgctatgaatgtgtttcataaattccattattacatatatgaaatttgatttatgctcaaaagaggacaactaaattgaagtgcccccgaaagttagacaggtcgtttcattaggcagcctctagggtatgagcccggtattgtactgggctcataccctttaattttgccttaattcttttatgattatagtattctatatactttgctaattcttgtttgaaatgtgttatactttcaaattcttttcgatacagaaattctgatttcatgataccgaaaaaattttcaataacggcattgtcataacagtttcctttgcgagacatactttgtgttatgccacattgcttaagagaatgacggtattgtttcatttgatagtgccaaccttgatcagaatgaatgaggagtttgtcttgatctgttacacgttcaaaggcttggtctaacattgttgaaacaagggaataggtcgttcttgaaccaattgtatacgtgataatttcaccattaaataaatctaacattggtgataggtataacttctccctaaataacttacactccgttatatctgtaattcatttttcatttggtttgtcggcttggaagttgcgatttaaaatattcggcgcaattttcccaactgtccctttgtaagagcgatattttttcatacgaacaaggcattttaaccctaattctttcataaggtgatacaccattttatgatttattttgtgtccacgattcatccgttcatcataaatagcttattacttgagctttgtcttgtttggtgattgtttcttgttttgaactacagcattaaacctttttaaatatacattttccgcttgtagtgtttctattgagccttctactactggttttatttttttatctttcatggatggacgcccctttttctttgaatgtagggcatacaatcctcctgtttcataagctatttttcatttccgaagtgtttcataagacggaatattggtaatgtctctataaagggataaaacattcttcttatgtgcccaatcaataaaataatgtcatacatacattagaaaaaacacacttggaggcgattctcatgtcaagaagaagattttttgatttacgcgaaggagatcgaattaaagtattctcagctggtatatttgagggcgaaggaatctttattcgcttcgctgaagaaaaggatgaagactttattttttgaattaaaaacaatagaaatgattgtgacagagaacggaaatgtgatcgtgaggattactaatattgttctataatttctcataagaaagcttaggaacagctgttaacaaatcatttacgaatacaattccttatccctgtatttaatgatgaaatgaaataaccattttgtcttactattttattggaactttaagtccatagatttatcctatagaaattattgtctacatgtagcacacttcttttgtaacccatcccctgaaacggtaagtttaagaattttctaacacctgaaatttttatctagaaactcttgattatcacctgttattatccggatatcttgtatggtaaaacctttttcaaatgagaatgaattttattccaattcctcttcttcttagtactgttacaaagtttttaaatatgaaaagctttaggttaacttgaaatgatttctcccatatttcatccgatttggatataaaaaaataaagagggtgtctcagagtaagaattttactactttaagacaccctctaatatccataattatatatcatttagttccgtcaatatgtttaagaattttctattaaatttatgatagaataaaatactaattgtacattcactcaaaccttaataaagtggtggaagattagttggcacaaacataatattcatgagatcaaatggagtaccggagtttaatgtcacatttatatctagcgttacattagtattatcacttgctactatattaccgatattaatatctgaaaaacgagctccattatcattaactccatcgttatttgtagtggtattaacatttgaaacagtataaactctaccgtttatagtaactcgaatagttgaatttcctattgaagatactcttaaataaagattgtaactatttccattccctctaagcgtataacgagctgtcgtgttgctttgttcaaatcttaaggaatcaccttgatttccaaatttttcagaaataaatgttcgagtttgattattcacttgagtggcatgtattggcgatatagtaaatcctgtataatcttctggcgccaaatggatcatagtaccattttcattagcggcatagatattattttttctgttatgcacagataccaaataggcccgtgctccaccaggtgttcccgaaggactttctatatttcttatttggttatagtgtaacggtcttgttagatcttcgtttctaataactaaaggaaccccagaaatattacggataaaataatctgggaaatagtttgaatttccacgggctgaaaaagcaccacaccttaaacttaaagttgtttgaaaggattctgtctgccaattcgtagaggtagcaacgccctctcgatctgtacctgaatccagccaacttctaacaaatggtgttgataaaggagggaggaccgtgctgcaattaaagttgtgattgagattagtcgcccctatgagaccagatgaaactcctccgctataattaaccctggcactattcaatgaatgagttgtagtactacccggtaaaccaccaatattagggaaggtaatagaaagcctagtaccactaataccagataatatataattcgaattaacttggaaaagagaatataaaaatggccagttttgtgctgtaaatgattgtgtctgctgtggtccactaccgctagcatataaattagcgccagaagataccataagactctgatatttaaacaatgaccaaatggatacatattcaaatacatttaaaaacatatatgttctaaattctaacatatcgtgtaaacgggtgtttaaccctctaaacgcagtttgatacgtatttatacaataattagaataatctcttgtataatttctcaggtaatctcgatacgtacgtaatgttgctgctgaaataccccattcatctgcattaagaataacatctctaataaaagaaagatgcatattggctgcctgtgcaaataaaggtaataataacaactggtatccttgtatctggaactggggtaatctatttagaaataattgctgcattgtattaaccgaagaagttattgataaaggaacagggttttgagtagggtttaaaaaattatctacttgttgattaaactcccttatattcgcttggagccctatcaattctgcatttacacgagcaagggtatctgtattaagtctttgatttaggaattgttctgtctcccttaaaatatcttgcattagatttgtactaccactaggaaatattatcccccataattcactcaatatcctttttccaataagactccccactttctttagcaaaaaactagacacagttccgactacaggagctacatataaactatgatctgttcttttccactccatccattctttttggatggtatctaatgatttatgttcaaaactaaatggatcatgggctactacattatacgcatcacaaatagttgttcttccactattcaatacattattcatataaaattcctccttaaatatctagttttatattaaaactaaactcttttgataataacgagtatgtttaagaaactacttactacttactacttacaaccacaatcacaattctgactttgattatacgtatcaattaaatcttgtgtgtatacattcaaatcttgtgggcatacattctgactttggttatacgtatcaactaaatcttgtgggcatacattctgactttggaataacgttttttgacacttgggggtagtgcaaattcttaagttgatgggcatgtgtagcgtcccctaaattacttattaatcttcttaaaaaaattaatacgaaagataatggcaatactaccgctaatattaataaaatagcttccattaaataacccaagcgctcatccccctctttacctccttttcaatatatgaaaacagcgttgtcacatatgcatgcatttgcaaaaataatacacctatatttgacaactttataacaaaaacaaatcggaatgattattatttattgcaactttattaaagatgtattatactaagttcgcaaactaaaacgtaattattccgttttgtattaaaatgatatttttcttctataattggggaaaatatatccgtaaaaagaaaagaggagaacttcatgcctaaaagattgactatattttcattcttacttatttttaccttaattttcgctggctgctcaaataaaaaagaaagtaatgccaagaaagatggaaagctaacagtttatacaacgattttcccacttgctgatttcgcaaagaaaatcggtggcgactatgtaaatgttgaagcgatttacccacctggtgcagattcacatacatttgaaccaagtcaaaaacaaacagtacaagttgcaaaagccgatttatttgtttataacggcgctgaattagaaccatttgctgaaaaaatggaaaaaacattacaaaaagaaaatgttaaaattgtaaatgcatctaaaggtattgagcttcgtgcttctactgaagaagagcatcatgatcatggagatggccataaagaagatgaacatcatcacgataaagacccgcatgtttggttagatcctactctagcaatgaaacaggcagaaaaaattaaaaatgcacttgtagaattacaacctgaacataaacaagaattcgaaaaaaactttgcagcacttcaaactaaatttactgatttagacgatggatttaaggcagctgtagcgaacgcaaaaacgaaagaaattttagtttctcatgctgcctatggttactgggaacaacgatacggcctaaaacaaattcctatcgctggaatttcagcttctgatgaaccatctcaaaagcagcttgctgacattacaaaaacagtaaaagaacataatctaaaatatattttattcgaaacattctctactccaaaagtagcatccgtaattcaaaaagaaactggtacaaaagttttacgcttaaatcacttagctactatttctgaagatgatgcaaaaaataataaagattactttactttaatggaagaaaacgtaaacacattgaaagaagcaacaaactaatccattacactttctaggcagctgaatttgttattcagttgcctttttatgtatttatccttgacttgaccaaaataacaagtaaaattatccatattagctttaaagctatattaatttagaaggtgagttggaattatgaatcttcacatttgtgaagtaacagcaaaaaattggcgttcagtagttgctttagacgtcgcaaaagatcagcaacaatttattgaaagtaacgcgttttctttagcagaatcattatatgaaggaaacggaacgtcagtaggtttatatgatggagaaacacttgtaggatacgcaatgtatggatggtattcagtaaaacataaaagtgtatggctcgatcgctttatgattgaccaacaatatcaaggaaaaggatacgcaaaacgtttccttcgcttactcattcaattcttacaagaaaaatttgaatgcaaaataatttacttaagtttacatccagacaacaaacttgcaatgggactgtatgaatcatttggtttccgcttaaatggggatattgatgatgaaggtccagttgtaggtgttgtaatggagttactaatagacgaaaatataagcctgtgaaaacaggctttttattatacatttatcaatttttagtttctctcccttatttaattctgttttgcaatctaatagaatgctcataaaaaataagcctgcaatttacgcagacttatttcacacactcctcgaaatgttcttggaaccactctttattaatatctcttccgataaaaactacttcacttactcgctcttcgccctcttgccactctctatcgtacgaagcagcaaataacgtatgtacaccttggaaaacgatacgtttatctactccatctatcgataaaattcctttgtaacgatataaatattcccctagctcttgaacgacagctgacatccactcattaagcttttgtaaatccagcggacgttcttcacgtaatacaaatgatttcacaccttctaagtggttatgttctttatgagggtaaatttgcaacgtatctttcattttaaacgtttggatttgtaataaagatggtatatctacctcacagttagtcgcctcaattaactttgcagtcgggttaattccttgaatttcatgcaagagattttctttctcattctcttcaattaaatctaatttatttactaaaacgacatcagcaaacgcaatttgctcttttgcttctaatcctttttcaaaatgtttatgtatatgataactatctactaccgttacaacaccgttaatttggtaagcagattgaatgactggatctaaaaagaatgtttgaataatcgggcctggatttgcaaggccagtcgtttcaattactaaaccatcaaaatccattttcccttccgcttttacgtccagtaactgttttaaagcaacgagtaaatcttcacgtacagtacagcataaacagccatttgtcatttccataatttcttcttccacattcataatcaactgattatcaatgccaatttgccctatttcatttacaatcaccgctaatttcttaccgtgattttctgataaaatacgatttaataatgtcgttttcccagatccaagaaaaccagttaatattgttactggaatcatttcgtacatctccttatagctatatgtttctacattatagcatatgaacactcccccacttaacaaagcttgaagtgggggtttctaacgtttcgacctaacggacgattaacgtcaggggagttaacacattagcgagctgtttcacgcctaacccctctatcccatttgtccatgcatttgggattacttttcgtaaaatgttagccgcagcatttacatctgcattaattaaagttttatttgctgaacgatatataccgcgctttattcgttttcctgaaaaagttgtattttggtcattttctccatacgttggaatgaagtcgttatccagaaaacttgctttcgatgtatatgattcttcagttacaacaacttgaatgcctacagcatttgctttgtatgtaatcatttgaatcagtaaattatgcgggatatgacaaaacgattggttatttctttttcccatattcgtttcttgtttccaacttttgttttgaccaataacgattttacaaacttcttcttcttgagctagttttacgatgtggtgactaactttatggaagacgtcttttattttcaagtaacgtttttgatgaagtttttctatccttttagaagtaaaaggtccttcattcgtttgttttccatttctaagaatgcttgtaaaatgactcttcattttgttgtaatattgatttatgcttttgacatgtttgcccttaacaaggacaggtttcatacctgtgtttgttacgatggttgcaaggttatcaatccctaaatcaatactcatataacgagcattctcttcaatcatttgttgttcagaaggaacatcaattaccaattccactacatattcattgtattttggaatcacacgaacttgtttcagtttaccttcagtgaaacctagtttcccaatatttaattgcaatttcgtctttggaaactttaaaaatctaccgtttttaatgatgcaatcttggtttgtatacagaatctctttttcagaagaacgaatatactttggaatcctaggcattccatcatatttgtttggattctttttatagtcttttaaactagcaaaaaaagatttccaattttggaacaaacctttcatgatggactggctacattgcgtaggcaaagctcgataatcattttgaatcatagccttaaatagtgcatctagaaagttgtaatctacataaggtttttcaaaattaggttctgaaaacaaattacatgtaatctctttctgttcttctttaggctttactttctctttttccaatttcttccgatagacaagacgttgtgtgtcattcatcttcccaatatttttatgaatattatccagaacttctttttgcaaaggctgcaactctttttcttgtgttaatccagtgtacacctggcgtatataaaagtttgtggtgttgtacatattcttagcgttatgacaacattcttgaaaataagaatacatacgatgccctttttttatccagatttgaagagttttatagtttgatggattttcttttgccattttattcacctccttgttaaggatattatagcaaaaaagaacatacgtttccgtttttttctcaaaaataaaatattcctttcaattcacctcaccaccttcatttacgtttagagatgggagtcctctcgaaaggcatgatagaaaaaatcgtttttatagcaaaacatatttattgtctgtacacctaattaactatataataacatgtagtaagaaagccttttcaaaacattattattcatcaagggggtacttataatggatcgagttcaaatggctgaaacgctagaattttctcgtattattcaaggattttggcgtttagcagaatggaatatgacgaaacaagaattactttctttcattgaagattgtatggatatgggaatcactacttttgatcacgctgatatttacggcgcatatacgtgtgaagggttatttggcgaagctttacaattaaagccttccttacgagaaaacatgcaaattattacaaagtgtggaatcgctcccccatcaccgaaatttccagagcgatatgttgctcactacaatactagtgcagagcatattatgcaaagtgtagaagcatcacttaaaaatttacatacagattatattgacgtattacttattcatcgtcccgatccttttatggatccaaatgaagtggcaaaagcattttcacaattaaaacaagaagggaaagttcgtcacttcggtgtatctaacttcttaccttcacaatttaatatgttaagttcgtacttagatttcccgcttattacgaaccagattgaagtttctgcattgcagcttgagcattttgaaaaagggacaattgatttatgccaagaaaaacgaatcaatccaatgatttggtcacctcttgctggtggggagatctttactggtcaatcagaacgcgccgtacgtgtacgtgaaactgtgcaaaaagttgctactgagctaggtgtttctagtatagatacggttatgtatgcttggttacttgctcatccagctaatatgataccaatcgttggctctggtaaattagatcgcgtaaaaactgccgctcttgctacaaaagttaacttagaccgtcaacaatggtttacaattttcgaaagctctaatggacatcctgtaccataatgcataaaaagaagagctgttttcttacagctcttctttttcatatgtatttctagtcatggcaaatacacacatatctcttaatccgtttccatctaccgcaacactcgcactttctaacgtaccttctaacttaaaacctaatttctcaggtatcgctctactcttcttattgaaagaatcacaacgaatttctacacgatttgcttttaattcagaaaaagcgtaatccgttatacctttcgcagcctctaccatatagccttttccgctaaaccttgtatcaatccaatatccgatttcaaattgaggtatatcccaattaatacgatgtaatccggctgaagcaataaattcacctgtttctttcgaaaatactagtaatcttaaatcctcacgttgcaaaaattgaatatgtgattttctaatactttcttctacttcttgctctgtttgctctttttgtgcaaacaccatccaaggttttagttcttgtattgaagcctgaattgcatcatatacaactttaccatctcctggtttcggcattcgaataaaaagtctgtcagtataaaattcagaaggaaaatcgaataataacggattcactgtaaacactccctatatttcttttatatataataatatccatctgaagttatatagtaaagaattttctgaattgaaaaccttttactcattcacttccaccgctacacgaattccagattcaatcgcaccttgaatccatccgtgatatagcgttgtatgatctccagcgaagaatattctcccctctggtttgacaatcgctggttgcagctcagattcttgacctgcttgaaaaagtgcaaatcctccaagcgcatacggatccaatgtccagctttttgaaattccagatatgaactcatcatacacttgaccacctaatattgttgctaagttgtgtaatgcgtaataaatacgatccccttttgataaaccatcccataacaacgcgtcataagaccatgtatagctacctaacatcatagccggtcctttctccccaattccataatttggataataggcataacgaattggcaaatctgttataattctgccacctaattgtccttgttcttcccaaaatcggcttttaaattgaattcctattttcgtcgcaggcatataatgtaattcacgaattgctttccatttttcatgagatatagaatcaaacggatctacttctacaaaacgcattgtcgaaaacggaatggtaacaataactaaatctcctgtaatactactatattcaaaagtttcctcgttccgatagaaagctgtcacaccattatcgtgttgatgtaacttcattaatttttgattatatataatattctcttctaattgcggtaaaaatgactttggcaatctatcattcccgcccacaatttcacaaaatccgctctcctcttgcataatgtatagaaagcgtaaagtctctacaaacgaccgttccaaaaaaccttctaaatctaataaaacaccaatcatctcaattgttactggcgaaaagtaagtattatactgataaggatgatactttaaaaattgtccagtagagtatctcccaaaatcctttacaacaatatcccaatttttttctgggttcttttttataaaatttataatgggctgtaccgctaacaataataattcctctgacgtttttccaacttcattcatttccacaggatatcttagaatacttggatctttttcatattgttttaacgtcgttttccgtccatttacgtatataatatccgtctcattcctattaataaaaggactcacctgtagcccaaattttcttatatatgccatcgttaatgtatgcgaatacggaattctcattgctccaacatctaaatataatccggtatcttccattctcactgtttctatacggccacctacccggttatttgcttcaaaaattttcacatcatgtcctgcagcctttaataaagatgctgaaactaacccagccataccagctcccactacaataatctgttttgggcttatcgtcttcttcaatcctttatctataacttttaacgcttcatccatttcagtgttatacattatatctttctgcacaattccaccccttacttcatcaaatggacgttagtggtttagtgcattttattcataaatccccataaacataacaccattgcaatttgaatattcactaaaagtacataagagacagatctcacttttctttatacttcgtataatatagcaactacaaagaaggagtggttaaaaatgaaacatacttatgactacgatgctacaaaaaaacatttagaattaaagaaacaaaacttatgtaaaaaacttagcaatatgacactatctgaaaaagaacgtgaacaactaaagcatgaaattgacaactatgaatatattttaaatctagtcgaaatgaatcattatgaacgcggattttctcgttaaaagcggaaataagattatccgcttttcattttgagcatttcactacgcatttttcataagtaaatatataataggatgtacattaagattgagaggtatattctatgatcaagttaagtgtattagaccaatcacctatttcagatggtagcacagcagcccaagctttttcacatacagttacgcttgcacaagaagttgaaaaactcggattcacacatttttgggtatccgaacatcataattccgtaagcttagctggttcaagtccagaaattcttatttctcatattgccgcaaaaacggaccgtattagagtcggttcaggtggtgttatgttaccgcattatagcccatataaagttgctgagaatttccgtgttctagaagcattgtatccgaaccgcatcgatctcggtgttggtagagcacctggtggtatgccaatagcaactcgcgcacttcaagaagggaaaatggtctcacttgatcaatatccagaacaaattgcagacgttgcaatgtacttacatgatcaagtaccagaaaaccatcactatgcaaacttaaaagccactccagttatcccaacgtctcctgaaatgtggatgctcggttctagcggagagagcgctaaaattgctgcaaacaacggagcttctttcgcatttgcacaatttattaacggcttcggaggccctgaagttatgagggcttaccaagaacaatatgagccttcatttttaggagataagcctaattcaatcgttgccatctttgttatatgcggagaaacaaatgaagaagcggaaaaaattgcttctagtttagatctatcaatcttattattagagcaaggaaaacgaactactggtacaccttctattgaaactgctcaaaattattcatacagcgcttatgatttattccgtataaaagaaaatcgtcaacgtatgattgttggtgatccgtcttctgtaaaagaaaaaataataaacttaagcaaagcatacaatactgacgaatttatgattgtcacgattactcatcaatttgaacataaattaaattcttatcgcttactagcaaatgcttttaatttataattctaaaaagagatgcatcacgtttaaaatgtaccctatagaatagacacttgaaaaaagtctattctatagggtatttgtccggttggtcctgttgctcctgttattcccgttactccgatcggtagagctgtgacgtactgtaaagctacatcgtctataagtactctggaactcccggcttgtccttctttataaataagtaaaatagctttatttgctaaaggtggagactgaggagtaattagatatatctctaaccaattactttgattgccattcggaagatgatttaatggaatacttataattaagccttgttccaaaaaaatagaattataataataagcaagcttaatagaaagcggaggacttggagcacccccaattttagcaagtgaaataagaaattcaaaactttcatttggaggtatagggattgcttgtatgagctgagcattagcttctcccccaattaagcttgcactatagatgcccgaatgactatttgtattaacaacttgcacgtttgttgtaatgaatggggcaagagtgccactttcaaagcctccattcattatcaagttagtaatcaaaaaatcacctctttaaaaaaataatttacaaataaaatcaacttctttatgaatttatatataaattaaaacttttataactaaaaatacatcattcttaaattttcctaacaaactattttgtagtttttatacaatcaatcacctcatttccctgatgtattaagagacaatattaaggaataatacatctgtatttattgtaatattatcttctatggttcaataagtaagagtgacaaaaagaagaagctaagaaatatttcttaacctcttctttttgtagattactttggtttatagtctgctttaaaaattacctaaagtaatctcatatcaaaatgttttgaatgtatacttacatttccgattttaaggatgttaggagaattggaatggagttactattttcgttattgtgaaagtaaactaatatttttaaatttacattagtgaacaaaaaagtacgaagtcaactaaaagacttcgtaccaacaacagactaaagtacagttcataggaaactgaaagggtatttcatctatttattataactcgcccattcatatttctaggaattaattattaaatatgcatagttccatatttaattgtctttataagtaaaaaaccaattcttctgtaataggattggtttttttgtatgtaatttagttattacagcaaccggaactcgtatttttaaatgtagtcttatcaatcttattataaaataataagtaaacataaaaagactccttatatataaggagtcttttaaaaggatacaatccctttaggtagatagtgatgggtatctattataacatatttttttataaaagatgagtaatacaaaattgtaattaaaattagttggttatggtacagcagttatattagcatgtatcattgttctttacatattaatatgtaagttaaattaataaattatataaattatataatttattaattttcatcattgatggaaataataaacctagttcattgaaaaacaacaatattacttttatacctaaataaataacgctagcatattataatccattttctctaattcatttggtatatattacaaattaaagtgcagcctaaaaaataaaaatgtagcatatagaagggtgatcgtgtgaattttatttggcaatctttaattttaattcttgctggaattcttttattaagaattgctggaagaaaatctatatctcaaatgactttagcacaaactgttgtcatgatttccattggtacgattattgtgcaacccatcgtagaaaaaagtactataaaggctgttactagtgcttttatatttgtagttacagttatacttttagagtattttcaattaaagtctaataccttcgaaaaatttattactggtaaatctaaagtggtcattgaagatggtagacttaatattgaaaatttaactaaattacgtttgacagttgatcagttagaaatgcgtttacgtaatcaagggatttctaaaattgcagatgtaaaaacagcgacacttgagcctaatggtcaattaggttatgaattaaaggatgaggcaaaacctttaacggtaagagattttcacaaaataatgcaatcatataatcagtctctagacgatgtacataatgaacagagagaaagtaataatatatttcaagaagtaaaaaacacaagcaaaaataaaaataaccatagtcataaagaacttaaataaaaatggttctaacataccttacttaaaggatgaaaaatacaatcttaatggggtattcctagcttgatggtgatggggtagcgtcaggaaaatgcggatttacaatgttaaggaaattcccatattaaaaagccaaatttctcaatatttatattgaaaaatttggcttttttcattactttgtaaaagctccctttaattgaataactaaacaaatttaaacgcacctatttgtataagtaaaattattcgcaaactcttcgttgttttttggttcgctatttatctataacaatcgataatttatagtttgcatattcgtttaattctttcagaaattgattcattaattctatggatggaaatttacattcgagaaggtaacaaccatctccactgattttataattatttattaaatatttgtcttgcgtttttatgaatgacaaataaggttgatgaaaaatgctttctgtaatgattgtaataaaagcatgtatataacagcctaatttgactcgattaactttaattgtataaccctcaataactccttgatcttctaatttcgccactctagctgaaacagctggtccagtcaaatggactttctcacctaattctttcatcgtgaaccgactgttcttggatagttcatctaagatacgtttgtccgtattatctaacatttatataactcctttcattaataaagtaaaacgaccaaaagactttatttaatctgtgtatccattattgggaataatataaactatacattgttcaaagaaaatctcaaaaaaaaggagttaataaatatgaatatacatcaaattcgtaatgcaacaatcgttgtagaatatgcagggaaaaggtttttaatagatccaatgttagcagagaaaggaacttacccacctttcccaaattcaccaagacaagatcaaaataatcctttagttagcttaccagtacccgttgaaaatattattaataatatagatgcagtcatcgtaactcacttacatttagaccactttgacgaggcggctcaaagaatattgccaaaagacattaaactatttgtccaaaatgaagaagatgcgacagaagtaagaaacgccggtttcaaaaatgtagaggttttacaggaagatacagtctttgaagggatccaactacttaagacaaaaggcgaacacggtagaggtgaaatactaaaacttgctggtttagtatgcggtatagtcttcaaacatcaaagcgaaaaaatgttatatgtagccggagatacggtatggtatgacgaggttcaaaaaattctcgatacacataaaccagaaatcattgtcgtaaatggtggagataatcaattctttgaaggcggttctcttatcatggataaagaagatatctacgaggtgtacaaagctgcacctaattcccaaatcattgtagtccatatggaagcagtgaaccattggaacttatcaagagaagaattaaaaagctttattagcgaaaaaggaatcacttcgaccgtttcagtaccagatgatggccaatcatacacgttttaaatccaattttcgttttgaggaacagccaatttcttaagttgatgggcatggggtatcgccaatcgaataacataaaacctaagctaaataaaaaacaatttcctagtaacaggaaattgttttttatttagcttttaaatcgtagttggtaatattttattatataattagtaaaaaataagatgaaatagctaaaataactgcaataactaagagtgataaccatacaattaatgtggtatgtgctcggaatgttttgacgtttaattagatattgtaaggttgcaataataatacttattccagcaataacggatccaattcctattccaatagcaatcttattatttaatgaggaaagctcttttcgaacagctaaatgaaaattagctacaagaaatcccaaaccagcaatagcaattgcagtacgtaaccaagctagataggttctttcattagctaaatgctgctgaatatattttgaatctactgtttcaagggcttttgacttcactttgtgttgctccattacatcgactcactccattaatcagcagtatagtgtagatgtgcatatccttttttacgtctataccacacaataagaatactacaaagtacgcacccaattgagactaattgagctattcttatatgggatgttaacatgagactatccgtacgtaagctttctacaaaaaatcttcctacagaataccataataaataagtgaggaaaatttctcctcgtttcaaatcaacttttcttaatacgagtaatactatcacacctgtaatattccagacagactcgtataaaaaagttggatgataatatgtaccatttatattcatttgattgataataaaatctggtaaatgtaacgactctaaaaagcttttagatacaattcctccatgagcttcttgattcataaagtttccccaacgcccaattgcttgcccaaaaagtaagcttggagctaaaatatcagcgattttccaaaaagaaaggtttcgttttcttgtaaaccatatagttgttagtacagctcctataataccgccatgaattgcaattccaccatgccaaattgcaaaaatttcaactggattttccttataataattccattcaaagattacataatatattcgtgctgaaataattgagataggtaaagctaaaaagattaagtcgtaaaatacatctgaagatattctgcgttttttcccttcacgagtagctaagataaaccctaatatagctcctataccaataataactccataccaatgtacagcaatgggccctaggtgaattgcaataggatctaagggtttaatttgttctatcattgaaaaatgccccccttttatttaaaatgtttaacaatatatacattttagattatttttattataacattgaaccttatcaacatataaaccaccttttctattatccgtattaaattacaaatgatattatgagagcattaattatcgttacatcgtaacaaaaacgaccatttttgttacggttattattaataaacttttagtctaatgaacttgcatactgagtgtaacaaaaatatgtaacaatattatttgtaacaatatctccatttaatcgtttttggtacaatagtcggtgaaggggatgataaatatgaagtttggttatatgcgtgtttctacattagatcaaaatttagatcgtcaaaagaaacagcttgaagaatttgaatgcgaccgtattttcttcgaaaaagtaaccggtacaaaacgaaaccggccggaattaaatagtatgctggaatttcttcgtccagaagatacagtcgttgtaaccgatttaactcgattatcacgttctacaaaagatctcattgaaattacggaacgaatttctcaaaaaggagcacacttgaaaagtctaaaggaatcatggctcgatacaacaacagcacatgggaaaatgttgtttactattttcgctggtattgctcaatttgaacgagatttaacttctgaacggacaaaagaagggattgaggctgcaaggaaacgagggaaacatcctggaagaccaaaaaccgatgaggaaaaggtagattacgctttatatcttattaatcaaggtatgagccgtacagatgccgccgagaaagctggtatctcgagaatgactttgtaccgtaagatgcaacagtaaaatacatatagttttgattttagtatagtaggaggaattacattgacctcaattgaacgtacagcctatccaaggtttaaacgaaacttaactcgaaaagagctgaaagagatttataccgtcacatatgaggagaaccaatttgcccatagagtagcacgtggaactattccggtctttagccttttagttatgctaaagtctttccaacgactaggttattttccacgtccaaaagatattccatctgtgataattcatcatatccgttcgagtttgcgtatatcaaatgaaaccgaaccaaacttccgaacaaagtccatatatcgacaccagaaagcaattcgtgagcatttgcaagtattgccctttgggaaggatgctttacatattgctactaatgccatatataaagcatctcaagtgatggataaccccgctgaccttattaatgtttctattgaagaattaattaaggaacgttatgaattaccagcattcagtacactagatcggcttgcacgtcgagtgagaacgctggttaataatcgtctttgtaatacaattctcgcccgtttgtctaatatagaaaaagataaactcgatcaattacttcatacgtcaaaagaaactcaacattctggttataattattttaaagaagttcccaaaagcccttctattactcatatgaaagatttacaaaacagactttcatttattacgtctttccttccaaacattcatgatttattagaaggcattccaatttctaaattgaagcactttgctgctgaagcgaattctttagatgcttcagaaataaaggacttcgctcctcacaaaagatatatgctgttgttatcaactatttatcggtcacaaattacaactagggataaccttgtagaaatgtttctaaaaaggatgggaatcattcataaaaaaggaaaagaagaacttgctcttttgagggagcaacatcgttccataagtgaaaatcttatttctgtactgagtgaagttttagaaacaacagctatgcatgatgataatacacaaattggcagcaaaattactgagctatttgaagctaaaggtggtatagaatttttaaaacaggactgtacagcaatatcctcatacaacggaaataattatctaccacttttagaaaaattctataagaatcatagaaaaacattatttcggctcatcacattattagaaattgactcaacaactcaagacgattccctcataaatgccctggaatttttattagagaacgaaaaccgtaaggttgaacatctacctagtgatattgatttatcattcgccagtgaacagtggaaacatacaattcgcgttgaaaaaagcacaaatttactttaccgtaaacgtcttgaaatctgtatattttcttatttagcctctgaattaaagacgggagaccttagtgtaaaaggttctgagaaatatgctgattatagacaacaattacttccatgggaagaatgccaaccgatggttgaagattattgtaatgaactagaattaccttcctcacctactgattttgttaatcggttaaaaatttggctaacatccgctgcaaaaactgttgacctaaactatcctaataatggacaagttatcataactgaagatggagaaccaatcctgaaacgtttggtacgaaaagagtcttccaagagtagtaaaatgttagaaaaagaaattatacaacgactaccggaacgaacgattcttgatatactttgtaacgttgaacactggactcattgtacaagacatttcggcccattttcaggatctgaacctaaattagagcatccaattgaacgttatattattacttcatttggatatggctgtaatttagggccagcccaaaccgctaaacatatgcgaaatatagtaacacctcatatgatttcttttgtgaatcgtagacatatcagtgtccaaaaattagatgcctcaattcaagacattttaaatcaatacaacctctttagccttccaaaactatgggggagtggaaaaacagccgccgctgatggaacaaaatacgatttatatgaagaaaacttactgtcagaataccacatcagatatgggggctatggaggaatagcttatcatcatgtttcggataattatattgctttatttagccattttatcccctgtggggtttgggaagctgtttatattattgatggattgctaaaaaataagtcagatatccaacctgatacgattcatgctgatacacaaggccagtctactcctgtctttgcactttcttatctattaggaatcaatttaatgcctagaattaggaattggaaagacttaaaattctttagaccaagcaaacatattcaatataaacatatagatcctttatttagtgatgtaatcgattggaagttaattgagactcattggcaagatttatttcaagttgttttgtctataaaagctggaaagatactaccctcaacacttctcagaaaactgagaagtgatagtaaaaagaatcgactgtaccaagcatttcgagagctaggcagagtcattcgaacgatatttcttcttaaatatatctcagatatgaaattgagagagcaaattacagctagtacaaataaagtggaagcatataatggtttttcaaagtggttattctttggtggggatgggattattactgaaaatgatccagtagaacaagaaaaacgtattaaatataatgatctcgttgccaatgcagtcatttttcaaaatgtcgttgatattaccatgattttatggcaactcaaaagagaaggttatcgattctcacgagaagatctggtgatgttaagtccatatatgacgaaacatataaaacgatttggcgattatgtgattgatttacaaaacattccacaaccaatagaagagaatatacctgtataaaagataatagggtcataacatggaaataaaaaccagtctatgacccatttttacacgtatctcggctgaacccctaattgtgccgctgttaaacgatgaaaaacaagacgtgaaaataactgctgtttatctccaatataagcttgctgatattctatcgtttctcctggttggagttgattcaaaatctgtatgacgttgatttttatgtattctgattgttttttaatggaaccatttttaaaatattccggatctggattttttacatatacatttgtatttaactttaaccgcgaaatataatacgtaccccgttgatccatttgatctaaatcctctaatgggtgtttttgcccatcccctcgaaaagggggaataagaaaaaataggatgtttttaaaaaatgcacctccaattgttagttatgtgtctaacaattggggtgcacttcaaaattgatagtctttagtcgtcgctacgctgcataccagtatacattaatacgagacgtaataattcaaataccgctacagctgcagctgctacatatgttaatgctgccgcatttaatactttacgagcttgcccatattcatctgttgatacaatacctaacgcttcaatttgttgcattgcgcgctttgacgcatcaaactcaactggcaatgtaacgagctggaacacaacacctgctgccattaaaatgatacctaataacaacaaaccagacatttgtgcaaatataccgattaggacgaaaatccaagacatattcgaaccaaagtttgcaactggcactaacgaatgacgaacgcgcataaatttataatcttttgcatcttgaattgcgtgtcctacttcgtgtgctgcaactgctgtaccagcaactgaatgtccataatagttatctgttgataatcgaaccgtcttagcggttggatcataatggtctgataaatgacctggtgtttcttctacagctacgttgtataatccattttcatctaaaatttttcgagccacttccgctcctgtcatacctgatgttgaataaacttgtgaatacttgctataggcactacgtactcttgactgtgcatacaacggtatgatcattatgatcgcgaagtaaattaaataaaacatcatgaacctccattgaagttttaattatagtacttctcattctattttcttctgccactattgtcaatgaataaaccttacaatccatatctttatttattgcattatctatttttagaatgtacattactttttcttttttctctttctcctttatactttctccatccaacataagttaatgtgaagaaaataagtcccccagtaattgtcataaaccaaatgagagagggtgcaatttcatctttttttactgtgtgaaatatcttttgcaaatcccctttaataatccctaattgcatttggccgcctttcgtttttaacataacgttacgaaattcatctaaataagataaatgaacatttacacgctgaacctcgttttctggcaaagcaatcattaagcttggataaataatattgaattcatttaaaaacgtatttaacgtttgttgaaactgcccagcatcttctttttccatcgctttttccatttgagaaaaggcatccattactttcctttctctttccatccaaagtggttgatatttcgatacttgtgcatcaacagcaagttgtaatgccagcacattatcaattttagcttgcttacctaaaccttcttcagagagcgattgttgcgccttatcgtaagctaaagaaataactctaacttgatctggtgttacttcctgcttcttttcattcccctttattaaaaattgctccgagaaatgttgtaatacttgtaccgctttttcatcttcattacgcttcactaactgtaacgagtcgtctaacaaccctgttagctcattccactcttcagcatatatacgtaacggaaacattataattagaaatgctatcaatccaattaatgttctcttcatcccggtcccccctataactactagtacaaaatatgttaatttggacaagaatagaacagaactagaccgaaaaatatattatcattttacaaagaaaaaaattctctttaagcagagaattttttctgtgacatccttttcttttttacgaaatatcgatataaactgtaacaaagtatactaccacctaaaatgaataataaaatagcacacgcagcatgcataaagaactcttctggtaacattaatataattggatctttttcaggatcaaaaacccaataatcattactaaataaaagtttatggaataatacaaaactcttttcaaaattaatagcaatcggtaacataagcgctatcggaaaaatgattgttaaaatcgatccgtgcagtaaaaacttttcatttttcttttttaataaataaattccgcctatcactgcaatcataattgtcgcatacatcacatattgaatctttactaaaatatttttaacatctacaaaatgaatacggccatttgtggacatatctaatgttggcaaatgtaatgctccgtcataaaacggggataaatatgtaataagcacatcgtaatttcttttaatttcatccttcgtcatatccgctaaatcaggaatatttaaaaaatcaatttcaaaataatacagccattttccatagacaactgccgttgttgcgagtgcaaaaatagaaaatgctatgctatatgaaacaactaaagtaatcaatcgatccaatatttttgtaccactcttatttttctccatgttctccccctaaatgttctaaccatcataaagaaaattgtttcctttgctcacgtaagcaacaataatatgtaatacatagtacagcaatacttaaccaaaacgtaaaataaccaatttcctctacaaacaaatgcataattccatatcgcggcatttgccaaaataaataatcaattgcatcgttatgcaacgtccacacagctgctactataaaatgccatttttttatacgatagaatggagcatataaaaatccttgtactgccatcgcaaagtgcgaaagcattaacatgtagcccataaggccaataggcccttttacgtaaatcataatcccgtttacaacaacagcccaaataccatattttattaaagttacaatcgctaacgcttctattaatccccagtttctctttgccaaaaaagcaattaaaacaaagacaaaaaagagactcgccataggactatctggtacaaacggccaaaatataggtgacgtttctttcaattgatttccgtaccatataaatccgtaaattgtacctaatatgttaacaattaataaaaataataataccgagcgttgtcttaacattgcatacaagtacaccaatccgtatgtccaacacctttcaagcaaagtaattcattcattaaatcctactctattataacaaacttcatccaactaaatagaaaagctgactacaaattttgtagtcagctttttattattttttattatactttgcaacgaattccgaaagcttcttcagttcctcatccgtacctttaaatacacctttaggcattgaaccttttccctctttcgcaattttagcaatttcttctggctttaaagttaagttttgcagtgccggtgctgctgccccgccttgtaaattgtcaccatgacatgttaaacaagtatttttttgcattaatttatagccatcatcatttttatcaactggcgctgtttttacaattgctccttgtttttttgcagcttcccagtcgtggtgtgctacagattcccaagttaaaaagataatcgatgcaattgctaaaagcataaatccagttgccacaggacgcttcaatggacgtctttctggacctcgatcaagaaatggagctaacagtaatgctccaaacgcaatccctggcataataaatgctccaattacagtaaatgaaccggaagcatacgaatactttaataactgatacaagaataagaaataccaatctggaagtggtatatatccagcatctgttgggtccgccattctctcaagcggcgacggatgcgccactgttaaacataaataaccgattaaaaaaactgcaccaaccatccattcttttaacaagaagttcggccaaaatgcttctgttttccctgggtattcagaatagtcttttggaatatttggtttccgagctactggtacccgagaatctcctacaaacttcatccctttgccgcgatgcataatctccctcctttagttctttcccctttaatttagcaatctcttatagtggaccggaaataccttgtttgcgaatcatgatgaagtggaaggccattaaacctagaagtgctgctggtaagaagaagacgtgaatagcaaagaagcgagttaatgtttgagcgccaacaatttcggaatgaccagcgagtaatgttttaatataaggaccaatgagcggtgtttgctctgcaatttgaatccctacttttgtagcaaataaagctttcatatcccacggcaataaatatccggtaaaaccaagacctaacataacaaagaaaataagaacaccaacaatccagtttaactcacggggctttttatacgcaccttggaagaaaactctgagtgtatgtaaaaacatcattacaattacgagactagcaccccagtggtgcataccacgaacaatttgcccataagcaacttcattttgtaaatagtaaactgattcccaagcatttttaatatcaggcacataatacatcgtcaaaaacattccagataaaatttgaattacagtaacgaaaaaggtaagtcctccaaagcaatagacgaatgcagaaaagtgatgtgccgggtttacatgttcaggtacttcatgatcagcgatatcacgccatattggtgtaatatccaatctttcatccacccaatcataaattttatttaacatctactttgcaccccctcttggcttcgcttttcctagatacagcgttccatctttcactttagactcgtacacatcaagcggagcaaggggtggcgtacctttaatgttaatcccatcttttgtataacgccccccgtgacatgggcaaaagaattgattcggatgtgctttgtccgaattccagttaactgtacatcctaaatgtttacatactggagagaacgcaacaatgtctccgctttcatctttatgaacccaagccgattttggttcttcagacttgtaccaaccatcaacctgcttcactttaaaatcgaaacgcttcggctctgttgtaatatcctttacttgcgcaacagcaaccatatctgttcccgcttcttttcttaacaccggatcaagcgcaaatcgcgtcatcggcattaaaataccggcagccataaagcctcctacccctgtgagtgtgtaatttaaaaattgtcttcttgacacgcgatgttctttgtcgctcacgaaaatttcccccctctatcagaaattgtcccctcgtgataaattatataaaaaataaaaactaggacactatcatgatataatacgctcatgcacaggtcaatatcatactactcataataataagaactttctgtttattgcgagtttccccatttctcttccaacatcaccattatattttttatatgcgcatgaataacttctctttttgcttgatcactaaattgttctaacgctaatgaaggaaaccaaaataaatctccctgtaactcttgcatatcctctttccatgaaaaatcacttgtaacataagcaatatgcttaaaaccttcacttcgtaaatgatttgtccattcttgcaaacgacctttttcattcttttgactttctaccaaatacgtaaacgcaggcagtaaaagcactcttcctttatactctctttccaattccgtgctcaacaattcgataaattcaccttgttctacaaccattttcatttcttttgctgccgaaattgataacagcggtattactcctgtatcaacatactctcttgcttgctcaaactgttctacatcttttacaatccacttcaaatcccttccctccttcacttgcaaatgacagaactttcactttatatatattaaaccacactaaaagaggtaaaaaaagaaaaactacccaatataggtagtttttctttataaaagtctgaaatttgtaaaaattaattaatccaaataaattctataaagtctttaactctgccgttaatctatgaaacgcttccttatcttgcttatctaacgcttcatcaatttgtttcaaaaggcgttctctcctaaacgaaaatacactttcttccaaaaacctttctgcaagtaaacgatctttttcatttacttcaatatgctttggtagatatgggttttcttctaatacagctacataattcgcattttgaaacgatgatttaaagttgagttgaatataaatatcctcatctcgatttaaacgaatatcatgaaacgatttttcagcatctgttgtcataacattttgtttaaaaaagtgaaacggtgtgtctttcacacaattcgctgacatcactaagccacgcggacaatattttgcatgctctacgaagtggactttatgcatcaattggtcgtgactcattaaataattcagaatccatacacattcacgctgtttcagttggtaattattcaaaaaccattttacaaaatccttcttctcgtttacagaaacaggggtattcatagcaattaagtccctcctctgtctttctcttttctttttagattcaagaagcggcattcagtttccttccaacttatgaaaaatcctctaaattatataacaattcttcaatatgaatttgtgtcgggtctagttgtaataactgggtaaatacttctttcgcctcttttcgttttccttcttccaataagaaataaccgtactcttctaagaagtctggatgattcttaaaagaagtatatgcactttcatagtgttttaatgcatccgaatacatttctaattgtttttttgcatacgcaagatcccaaagtagttgtgtatctggttctccactatcaatagcacgctctacaattgcaattaactcttcgtacttttcttgtccttttaagatatatgcatattttaatgttgcacctaaatgccctggatctaactcaagcgctttttgaagaacttcctctgcttctactattttccctaatttcgccgcaatgttcgctaactctacataaaatggaactgaaagctcatctactttaattccttcatgaagcgtttcatagctttcttgaagcattccttctttttcatagcttttcgctaaatacatgtacagtgatgcgtactcagggtctaattcttttagttcttgccaagcaccaattgctctctgatattcttcaccttggtataatgtaaaggcatatccaaataatgagtgaatatctttttgttcctctaggcctgcttcataataagaaatcgcttcttcccagtttccgatcgcgcttaacgtttctgcgaggcgaagtgcgatcacaacaccacccattactttatgttccgctaatagcgattcataataagtaattgccttttgttcttcacctttactactatataattctgctaacccaaacgtaataacaggttcatcaggcatcatttctttcgcctttaatagtttttgctctgctacatcatcaaaaccttgcatttggaataaatctgcaacaagtaataacgattgaacatataaatcgtcattttctggaatatcatgaagcacttcaatcgcttcatcttctttatctagatcaatatataattctgctaaaaatacagtgaattcactttcttctggatacagtaaacgtaagtcttcagtaattgctaatgcctcatctgtaaatccaagcgtatgatagtaacgagcgatatcatacttctcttcatcattcgcaatttttaattgttcttttaataattgtaatcctttttccgcttcaccattttcaatatatgaaacagcttgttcaaacttttgcataaacgtctcctttaattctaaaaaatattctcttctgttcatttatcataagcaactcactgttagaacgcaacctttagaatgagcatacttcttcttatacttcttcttacagagtagttaattgttcaaaaggttcggatatgacaccgataccttaccatcatcttctattgtaccgctttcttttatgaccgtgcaaataacttctctcactaattatcgagccatacaaaccgtggtttacagaataacttaattagcagtcttcaacctttattttgaatgcgataaaaaaggctcctatactaggagccttcacaatctcttaagaatatgtttcttctttctgtacttgctcatttacaagctctttcagcaactctataatttcatcattttcttccttcaaaccgacagtaatacgaataccatcatcgataccaaatgcagcaccagaacgaacgatatatccttttttcattaatcgttcgaaagcttcattacccggtataccaagttttaagaaaatgaaatttgtttgggatggataatagaatacgttatattctttacaaaatgcataatactgatttaaaccttcagcattcttttgcacacaatcttgtaaaaaggcttgatcttctaatgcagcgagtgctacagattgggctacagttgatgtattgaatggtaacctagctacttctagctgtccgtttaacttcgcatccccaatcgcatatccgatacgaaaagcagctaaaccatatgcttttgaaaacgtgcgtaaaaccataagattttcatacttttcaagaagtggtaatgtttgcggatagtcttctgcttccgcgtattcataatatgcttcgtccataataacgagagccgacttaggaactgattctaaaaatgaaagtaatttttgtttctcaacatatgtacctgttggattattcggattacaaatccagacaattttcgttttctcatctacttgctctagcattgcatctaaatcgtgaataccatctttaagtgatacttcacgaacttctgctccttcaataacagcatggtgatgatattgtgaaaacgtaggattcgccattacaacgtttgttccttcatgtagtaacgctcggctaatcatttgaatgacttcatctaatccactaccaaatagtagttgttctgcttttacacctaaatgttccgctacttttgtccgaagttcaaaggcatatccatctggataaagggcatattggctcgctaaagaagttaatgcttctgtcacacgtgctgaacaaccgaatggattttcgttggatgctaatttcacaatttttgataaaccatattctctttttacttcttcaatgtttttcccaggcacatacgctctcaaagttaacaattgctctttcactctcatttttcttcccccagtcatttcattcaatttgattacaatacggttatagccccatgcccatcaacttaagaatttgcactacccccaagtgtcaaaaaacgttattcaaaatttcatctaactcacaatcaatcttatacattcccttcaaaactgccttaacaatactagaaggtaaacctgtatgttttttaaagtgatccttactaaactttaaaattttattagtcactaaattcttaacaatatattgataacgtaaaggacgaccacactcacacggatgatctttcgaaacttttcctgcatcaatctactcaataaacatccattgagtagatatatgttcagcatcctcttcagattcgccaccttttaatctagctaacacactagagaatgctgtctgattacctctcttcaaaaaaatacgtaaatactcttgttgttcatcagacaaactacccattattctatccctatcttctggatctaaataagcaccatacataaacaacaaatccttccgaaaaattaaattaaatagaccatgctacaaattacatatataatacaattagattctttaacaatcatttcagtcttatgattcttcaacccattgaagaatctacatttttgtacatcttcagcccattgaagatgttttttttatatctaaaatcccatttactaaatcaaaaacattatttaatgttatattcgaaaccggttctggaacacaatttatcatagtcgataaaaccttttcatccggcacataaacttttatatttttcttcgctcttgtaattcctgtatataataaattattagtatttaatttcggctgactttctaaaaataccgccacattctcatattcactaccttgagatttatgaactgtaaatgcataagctggtacaatattaactgtatctaaatatctataaaacacttgcctatcttcaaaatccaattgaattaaaatacctttatcatcataatcaacaattttaccagtatcaccattataaacccttctagatgaatcattagcaatgatcatgactctatcaccgatttcataacaataatcattaaaacacttcgtaattttatccttattagcttgaactattaaattaattttcttagtcattttttttgtatttgttaaaatttgatacccctgttccacaagtggtaaaactagtttttctaattgtttttcatcatataatctaaaatcaattaattcacgatttaaaactttatatgcaagctctaacacagtatctccacttctaaaaacttttgtaagtcttatagtatttataaaatctaaaccttctaattcaggaattacagaagaatcattaacaggtggaagttgagcatcatcaccagcaaaaataatctttgtataactaggaacagctaataatactttcatcaaaatatctcttggtatcatacctacttcatcaataatcaaatactcacattctaagttattatactcattctttaaaaaattcgaattccaattagatgaacatgctttatgaactgtcataggcttgtattcggttaattcatgttgactcaacaattctttaattcgtacagacgctttacctgtatacgttaaaataaaagttgtacgtggattaggctttaattttttcaacaaattaactaaagtataagttttacctgtaccagctcgtcctaacaataatgtaattttattttctacaaaagattttaataactctaattgttctttagttaaatcagtctcatcaaaaacagtcgataacttatttttatattcagcaactgaaacttgaattaaacgctcatgaattacatagttacaatttataaaatcatctaaatccaatgactttgaaaatttcaataaatcaattgcatactgatccctaagcattacagaatgaaacttaataaaatcttctacactattttctaatacttttggaacctcataacttgttgcattaatttgataatcatatacccctaatttcttatacttagattcttcttcatctttttcatcaaacaacttgatacaattacttgaactaattaatttcttagctatatcaccttccttttccaattcagaaaaggtttctatagtctccttagtaacatatctagtaactttcgatacataaaaagaaacaatatcagtatctacagtgtcatatgtaagagttttatttctctccatagcatgatccacaatatacgcattatcataaacctcactcacaccttcaactgttatcttcttcattaaataatgagaaacataacgattacataaaaaatgataatgaggttgtccactttcatgcaactcaactaccctaataaacttaaaatcttcaaattcattctcttcaaaacgtcttaaaattcgttcgtacaactgtttatgtaatatttcatctcgcttattaacttcatgaatagccggaaatagctcgtctactaaatgattatatttcttatgaaattcaattttttgtttaacatttaaacccaaataataaaccttttttaaatttgcaacttcaatgattgcattttttcttgaataaattccaagttcaacatcaatatcaaaatctatcatttttttctttttcttttcataccattttaaagctttctcgtaactaacttttttacgtctcatatatccttcaatcgtaaaatcactagacaattctttacgaatctttttaaaagtcttctccagatcatcaataccatccttagaagtaatagtattaaaaaagaatagacgttcatgctgagaaaaatatttaattcgaagttgtaaacgtgctgcaatgaccggaccacatacagggcaagaaagctggttacaggacattcttcggatcataacatcaccagtagctttttcgcgtaaaacgatggtccgccgaccgcatttagcaatatctaaagccataaaaaacaacctttctaagaaaacgaataaaaagtgcgactctatccctattattattaactagttaagtagaaactacattaaactatgaatttacttctttactttatctaacttttctctatatctttttaaagcatcttcaagaaaaacacgatcttttactaaacactcaagattatctaaatgataaaaaatatagtcaatatcattttcaataaaagatttattacttaaatattgttcaatctttaaaaaattgtcttcacaaaccttttctgaagacaataaaatactttctagttcattaataacattcgcataatacgtttttaaatccataacaacacctctctataaacaattccacaaagtgtccataacaacacctctctataaacaattccacaaagtgcccatttacacagtaaactgttaaatatgttttattacattctcacaacgtttactaaagtaaatatcaagaatgtgcatgtaaccactccttaaaatactcaaacatctctttagaatcctcttcaaacattggcgaatcataaatccttatagactcaagaccctcataaaaaacaaaatgaactccagtaccattaaaaagaaaaactccttttaaagttagatcagaagatctaagatcatttgaattaaaatcatgagaaatatgattggattgagaagccaatttcataacttgctttgcaaaaaatccactcaataaaaccccttcaaaatcaccatcttcagttgtagaaatgctcgcatatttaccaggattcttcctaattaatttctttatctctttaatattttgcaagatatcattccccttaaatatcttctttctttaaaaataaacacatataattttaattcacatatgaatcctaatgtttttgtctctttaatttttcaactgttgtttcatttttaaatacacgtttattcagaacatcaatctcaacatctttatcctcaactagcttatataacttcgtaaaattatcatctatttccattcgatgtgcttgcatttcttttctaatttcttttacctcactaccaatcgtatctactttcttatcaagttgatccaatttctctaaaatttttgttaatgcatcatccatatttaattctcctcctaaaattaaattacaaactaaacttagctaaattgttatccttattaaccacacttaacaaatctccttgaaccatttgttgttgttgtatttgcgtatacatttgttgaagtttaggtaactcctcaaacattgtttgttgttgtatatattgttccaaagccaaataaattaaagtagatttaggtacaccagttctagcgcttttttcatctaaccaaccattaacttctttagaaatacgagtattaacacgaaccatttcagcttgtggttttttatttaattcttccatcttgatcctccttgatgttttattaacaccaattttacatcaatagagtctataaaacaataaaaaaagccttttcggctaaatttattttctgaaaaaatgccaccatctttttttattacttgccgccaccattcttttcacttctagcatttctttcattaatctaaccaattgctgatctctatctccaacgcttgtttcaatcatcttagtttgatttgactgttcatttaatttaatagttaattcatcaattttattattctgcattaaaatcaattcctttaactcttcaatcgccttattatcccctccgttttcaggagatatatcggttataactcgattcttatccgaaataccaaactcttcaccaacaagtctacacgattcttctatagtccttcctggttccgccttaactaataataacctcttaaatacttctaaatcatattcactaaacattacctgtccttttgaatctcttaagaagttatatccggtatatctctcaaacatgccataatattttttaaaagttgtatgattaatatttaatgtttgtgctgcttgttttgttgtttgatatataataaccattgcaatcacctcacaaatttacattcgatataaccgatataactccttgttttataatttatataaactttataaatcataataaaatttcacgtcccgtattattccacaaaatcaaaccgtcctttttaaaaaaagggacacaaaaattttttattcgtgggatattcccacaccctttacgctcacagcgagtgtcccccaaacaatgtttgggagtacgcaatagcttgatttactattcctttaggcaaccctacgggacatcaagttttatttaaaaaactttttacaaatcaaaaaacttttctaaataaaactccttcgccttgctacggcttcttacaggctttccatttccatctaccgattcacatttcaaaccttccagaagtgattttgcgtattctgatgaatatatacatcgttccttcttttaatcattctacctttatagctgaagttatatcggctatatcttctataactcacaattagatccaactatatattaaataactctatagataactaccttgttaatatttttcatcctcttaacgcttaactatccctggcgcgcatccgcctaaggccgaatgcgcgccatacctaacataatctttagggcgtaagcactaattctgcgacaaatattaaaaatattttttctatagaatctctaaatatatacttatctcttcttgagaccccaacactatattcgtatttaaacctccaacgatcctgaatttagtcctgctgccatttcattttgatttttttataacgattacttggataaaaatcttaatacttcgccccaatatacttcaaaaaatgtcttccctaatcttcgccattcctcgctaattgccacaaacattaattatttaatctgtcggatctattagtaaggctacatcaaaacattagtaaaatagaccttataaatgttttgtgaccacaaaacgcattccctttttcaatcgtggtcacaactctgtacacaatgaaaaattattctatcaggctttgactgatacacgtagacacaactgtgtccctctccttatcctgcattttctttttttaatacaaaatatttaccagcttaaaaagccatataaacctttttttaaagaagagcataaggaaaccgaatcccattttataaaaaaagtgatgaaataggctgagcctattgggtttctattttgtgaattacgggatgcctttttgggctttgtagcccgttttgtgtacgtttaaagcacttttgtggcacgttttgtgtcccttgtagcacgctttacgcccctttaaatcaacgtttttttaacccgaaaaagtgggacgtctttttttactcatatgcgttctgtatgcatttttggtcattttatatgcgttttgtatgtgaaaaaaattaaaagtatgcgttttgtacgcgccaaaaatgaccactaaacgaccacgaaaactgggacgcctatttattaattggtggtcactgggtggtcattttttcattctgatggtcatttgttggcacttagtggtcactcagtggtcactaaaaatgcaccaaaaaattaaatttgtggtaaaataaaaacgaaattcagcgaagtttttttctgttcaccttcgcaacaacataaaacaaaagaatgatgattaattttggagtatccataccttagttggaactaaaaaattggtgtagccttaccgtagtaggcataaaaataaaaaaaacgatatgttaaagctatccttttgggtaacgttaacatatcgttttttttattcgctaatacaataatgcacatggctgctatgcattgatcctcatcaacctcttcttaaaaactcctataaaactattaaaatatacaacatttataaatggaatttcattttatctttcacaagaattatcaatctaaaagcaaaaaaaccaatttctaataacatattatatacagtgaaaacccattggaaacacattgaaactccattgattttctcatatttatgatatcacgtttttgttaggctttgtctaacctgtcacctttagtgatagcaaaaaaaccttatgctcttctataaataatctgcatttaatataaatttatataaaactatttcttaaatatattatctacctcatcataatcacgaaacgtcactgtatcttcacattgaatataaattccttctccaaaccaagcgaaattcttaccccaaatcttacgaaaaacttcaaacaaacgttcttctccagtatccttatccaaaaggactccttcaataatctcatcatcagtaaaaaccactacattttgattagttaattttttaatcttagattctaaaaatttgtcttctaacataataaaatcccctttgattttcattttttgtacgtgaaaaatacgtcttttttccgtacaatttgtattatacgatatttttccgtacaatacaagaagaggtgataataatgacagataaaaaagaaagagtagaaatgagaatcccacaatcaatattaaaaaaagttgacgaatacaaagaagaaaacggaatttctactagaacagcaacaattctagaacttataagaaaaggattaaataaataaaaaaatagaagggataatatacatatcccttctaactaatatctgattctatataataaatacgatcaatataatctaaattctcaatatagctcaacttgccttgagtgactaaaaaatctaaataactacaaacatgaacgtagatatgaggctttccagtaagataacgtttatctaaagagccaacctctttaatcataaattcacatagttgtctcacacttacagaattaacattttgtataaactgcaaaataaattcttgttcaacaaaacttaaaaattgatacgaaatgttcttctcaatagaaacaggtttcactttcacaggctgacttcgtatagtttgaacattatcatcatctaaattaaatccaaaaacaatgtcttcatcaaacaaagaagcttgtccttcttctctttcctcgtttatttcaaaatctacagaatcatttttctcaacaatattcttctttaatgaattataacttctcaaatcaccttttaatctcataacctgacgttctaataaaggtaaatctaattctaaatgctctctaatatctataggcataatcaaatcattaggaatagaatccatacctaagttctcaaataaagaccaaccagatgaaattttaatcaaaatttcatctaactcacaatcaatcttatacattcccttcaaaactgccttaactaactcagatttaataactacatctgtacgtaaaacatcaaatatttccttattcaaatttttcatcggcctgtaatcctccgcataaattccctttccatttcttttagggcttctttttcactttggattaaagttttctcagcaaaccctttgtgtggtgggtttggatttttacttgttccccagttttgaaatttcatataataatgcggagaattatctgctttgtcccatccaatttcaattgaataggaactaccttttttcacaactttccctatattaatagcatccttagcgtgttttccatctcgccatgattgttttggagttggtttttgcacctccggacccacaggagaatttctttctaagttctttttgaatacctttgctccagcttgtaatgattgctttgtgatctggggaacatcttgtcctaactgttccaaatccctaatccattcttctattccgaaaacttctaattctgccaatttgatcgctcctcacaaataaggcacatttccttatgttgttcgtcgatatcaataactgacttaatctcgtataacttcccatcataccttacacgcattgctgaattaataccttctcgatatcgaattgtaaagtttattagtttaataacaaactctgcatttccttgaaatatttctgatctaaagcctgtaccaaatggtgttttaggttctgcccatacttttacgaactctagccatttagacggatgaacatttccttcttcatcttttgtttctgatatttttcgctctagtatgatacatttgtttaattttgcggcatttaacggccgcttatatttaaagggctgcatattaatcaccgtctaacttaatttcttctaaggctttatcaatgctcaaactattaatttggcttaaaaaattcttatcaaaatactctaaggcatcgttataaacataacgagaacgttcaaagactaattctttgaactcttcatcattggtaatttcatagtcaccgcaaactcttagtaaagccttattagatgtaaaaaggatacgtcttaggttatggtcttcttcatcacctaaacgcatcctttctttaaaatcttgcaatatttcatctgaaattgttgcgtttctcatttacttcaccctttatttagtttttgtttctgcaggtggtgtaaatgaaatttctaaatcgtaaacaagagccgctttattatctttcggtttcccattagcaaattgtttaattgtataaagggtagcatcttcgaaagctaatgtttgatcaaattcttttagcttgtatccacctgcgattgcagcaatatattgtccttttacaaagaataatgctttaccaacaggaacttcctcacactcgacaggtttaatgttataaggcaatgccattacccattgacctgttgcggtctggattgtattacgtgcttgtacgccaatcgcatcaatcgggttaactaccattacaattttatttaatacttttctggatttcccttttgcatcaacagataaagcttttactacttcataaagttcgcctgctacaattacccctttatcagacggagcaaatgttagtttaccagaagattttttatcagtaacagcgcctgtttctggatttacatctttcattaaaccaactggttgatgtgctacagatccgccaccattaataaagccaaattctagaccgactgaatatgtttctactaaaacagttcgaacataacgttcaatccattccgggccaagttccttcatatcatttggaattgctgcaaatgcagttaatttaagttgaccaattttttcttgtttgaagatagcatcaatttgcccacggatttccccgaataattcgccccatacatacgccttcgttgcatcagagtaaataaacttcgtaactgctcctaaatcttgcaaaccaatttcagctaataagggatgttctgtaactaaatcttcaaacacacgctcttgagtcgttacaggaaggattgagccatctgtaaatccaccttctttaacaactgcattgaagaattttgtttctgctgaagttaaaacattttgaccacgttgctgtaaaattgaacgatcaagcatatcgttatttacttgttcacggaccgtatttgctacatctgtttgtagtgcatcaaagaaaccttcaaacgctgacgtttgttcttgttctgtactttctgcgttagttaaagtgtccgtcaactttgcttttgccttagtaaatgcttcagatttattaaatttaattaccattgtgtgtttcctccgtttttttataattttaaaaggagccctttaatcccactgttttttacaggtttaggattcggctcctttggttgttcttctatattgttttgtaaatcattcaggatttcattttttaatcctgataatgctgcatttaaatcttcttttgtaattccttggcctttgttcatggttccatttctaaagccatcgattactttctgcggaagcatggcagcagtagccgttgaagctgtcattttaactggattctccataaacatgatttcatccgcgaaattgttttctaatgcttgttgcggacccatccaagtttcttcagccatcatgttaagtagttcttcctcagatttaccacttttaatgacataggcatttacaatagctcgatctgttatttttaacatctcggctgccttttccatgtcacgatgatctccaccatgccacttagcagcgttgtgaatcatgatttttgctgttggagaaattcgaactttatcaccagccatcgcaattacagaagctgcacttgctgccaaaccaacaatttgaacttctacatgaccaggataattttttaatgctgtgtaaatttccgaaccctcatctacataaccaccaggactattgattgatacaattaaatcctcactatttgcgttatccagttgttttgtaatcttacctgggcttgtagcatccatttcaaaccaatcataaatccaagcttcatcattcgaaataattggtcctttaacgtcaattttcaccgtcatttgtattctcacctccttcagattcagttagtttcgtatagtttttcgtaatatgatgtgtatttaagttaggatcatcagaaacttcatatcctacttctaatcgaatctcattccctgtaaatgcacttgaagaaatgagtttatcgatgcttgtcgcaagatcaaatatactttgataagaaacagctttaacttcaattttttgacctgaaagatactcttcttcttcaaaaaatttaacgtttgcttcatcagaaatcttttttaataaaggtttcactgtgaaaagcatataatttttcgtttgcttctccacatcagccatctcgccatatatcaaagcagttggaataccaaaagccattgctacttgatttaagaagccattcgttactttattgatttcctccacactctgaccagaattccctccgccagatgtttcagcatacttaaaacctggttgttgtggaataagagcaacgtctttttctccaattgctttatacatgttatcaatgaattcttgcagtttggcttgatgtttttcactctttgcagcaagcatatccatatcaactgttccgcgaatttgattcttacgtttttgagaacttaatattctaccgaataaatcaccataatcagtaaacaaaccatcgataagaggtgataacttatcattcctgtatcttaaatgaatgacttcactttgcttaaaacttcgcttaaactgataatcttttacggtgacatttgtaaaagtatcttcaaacacagcatattcattatgttcaaagtcatcagcaataagtaaatcaccatcatccgcttgtataatcaaagcttcattatcataaataagtttgtaaatgaaactctcccaaaaggtacttgctgtcatattcttattcggtctgacatttaatcgatagtaaagctcatccttttcaaattcttcaccatttttcactctaaattctgactgactaattgttctccctaaaaaggatatacaggtatcaatcgccagtcgcttcatgtgtactctattggctttctcaataaacatttccacatcaaacataaatcctacttcactatttcttttaaatactgcatctagccatccaatgattatcaccccctttattagaatttaataccatctagcataaagtcgaattcatccacaagaatgttatccgcttgccatagcgcatgaataaaagcttgaaatccatctgttttacgcttaaattcatcttttttcagatactctttgttgccgtcttttttgatgtggacgtagacgttgttagtgtaccaacgcatcaatggattatctccaaaaataatgcgattgtttgcaaacaacgtttcaactcttggtgctaaaagagaatgtattgcctttggattacggatatacaacaatataaatccttcagcttcaagtgccgttttgacaagatcaaggcggaatgtatcggctacaatcgtattaacaccgtataactcacgcatttttacaaaccaatctacaatgtgagagatattaataactggttcatccacaatagttagtaagccattttcagcccattcatatataggtgcttttaatttcaccttgtccaaaaatcctttacgtacaaatgaatgacctttccatatataatcttcaccatgtttaaagagtagaccaaccgcagcaaagtctttaatgctggcgaagtcgagtccgcctacagctactttatgttttaaatctggaacctctctgagcgtttccccatcttcttcaaaaccagtacgcatgatttcttcccatgaagctacagactttgttaaatctgtttcaggataattcatacgttttgttatgaattcttcacggtttgaaggattattttctaattgtttatattgagttaatacctttttaaataattgtttagcataagaacttctcggctcgctaaacatcggattcgctttttcccatacatcaggattatcaatttcttctggattatctatcttgcaaatgaaagggaataatggatcttctaaatctttcccctttagaatattcatcgcccgctcttttgttttgtccaggaatccatcgcggacaaagccatctgtaccaataaaaaattctctagcatttggcacttttccaagtccactagagaatacatttactacatcaaagttttcatatcgatgtatttcatcgtaaataacacaaccgtcacgaagtccatccttagaaccagcattagatgtatgatattgaataatgctttgcgtatcgttactcagtatctctaccttggttcgataaaacatatcttctagtatttcttttcctttaatagcatcatagacttcacgaaaagaaactttggcctgtttctcgttgttcgccacaattgaaacattgtatcgatctattccgtgcagcggactaataaagaaatggcataatgatgaaattaaaccgtttttaccaccaccacgagccatcataattaaaaattgctcgtaaaaaacagaatcatcttctttatagaaaagaaaaacgaatgctgttaggaacttttgaaatgcttgcaattcaaagtaccatttctcagtgaattttatatagtcctcatgcatttcattatcgaaatacaaatcatcgcgtattaaaatgtatttctccaggtactcaattagcattatgcgctctttattcagcttaattttccctgcgcgatacatctcaatatattcagtgacataattattttgaatcatgttaaatctttaactgagcgcacaggttttgaaggaactttcttttcttctgccgatgcttctaatccaagtgcatctaaaatctttatcattcgatcatttgttttatgtaaatcattaatagaaggattggatttcggaccatgcatgccagatacttttattcctgtttcttcaatatcatcaacaagaacacactttaaatcccacaacgataaatagtcttgaattaagtcagtataatgattacctacaatctttttttcttttaattgatttgttagatccttttcaatcctttttctcattgtttcacgcttcactctagccacaatatccctcccttctgatttacatcgttttccaatttaatataacgcgcgaatttggttctaaatttgaaaaatcgaccccctccccggtgcctcgttccccgaaaaagattgaaatattttaagggggggattgtttctgaatcagttttaccacttttcatcgttttcccatttattcggtttcttttcgaatgttctaccgtgttctttattatggcaatccacacagactgtttcaagattgtctatttccaatgcgagttctggatgatgttctagttcttttttatgatggacgacgagctgtatcttcttacgctttgcactctcactgtactcattggtatctgtttgtactcgaccgttacgtttacactcttggcactcatagttgtctctcttctttacttgctctcgtatactcttccactcaccactgtcatagaacttacgcttctgttgtttggttttgtattctttcataaccgataaagctccacttggtcttccacaataggatgattgtgctgaataacttcagtattgaattgcttattatcagctggtacatgttcaatatgaatgtatgtccgattaatcctatcaatcgattgtgattcccaatcaaatgcaacacgtaactttctatctatctgtttacctttgtaatgaactataggtttagcatctatatctgttaatgtaattgttaataaaggttctacagtctcgttagattgtttgtacttctctaacttaaacatatctacaaacgcaccattacatttcggacaaacagttacttcttgatattcatcttctggcgcttgataagttttaatttgatagtcacaagctaaacaacatctagaaacattacacatctatcctcactccttaattgctcgacatttaatagaatctatagattccgctctacgtaatgtttatccacccttcatcctcctccaaaataaaaagccgctatctatatcgatagcgactgttcagatattaactattccctaatctcttttaatccctgtaacaaatggttcaagcacatactttgcagtaactcctgaacttccatcaactttcacttctacggtctcaattgaagatacatgtagaggatttattgaaaggttaaaaaaatgaacaaatcccttatacaattcccctttttcatttgagatacgactcataaagtcttctggatgaacatcaaggtcatattctttaccactgtccataataacttttgtatgtaatgttctagccatacttacacacccccttcccatcattctatatttcgacaaataaacacaacatccttttatcgatatataatttcaaatgtatagagaacgttattatttacaataaattcgcatacggtaaatgaagttttattcttctctcaactaacaaccacgacagaaactcttgtccgacttatcaggtctcctcattccgtctacctaggatgttgttagctcaaagaagagcaaaagctctccttaataacggtatcactcaatcagtaccatctgctggtttcggattttatgtgccatcattacgaatcgtttagaaatttagaaacaacatagtgagttgtgttttccgccacttctcacaatacaaatataacacggtatttccaaaacaaccggtacatatcctgccaaaaagcggtcacgactctgccacttattttttcttatcaatatcctcacttattctttgcaactgttttgcccaaatcagtggtttttggcaaccgcttatctcccctgttctttctccaatgagttacccatatcttgtattgtgtgtaactgaccccttcgccaaatcccttgatattattgacttaattaaactttcccttttgagttacacagtacgaaatttatgagtaactgtatagatttaaaaagaaaataaaaaatgcacctccaattgttagactgtgtctaacaattggggtgcacttcaaatcgttagaaaggccttttctttttgcgttaaaacagaaaatgcatgtaaatttactttagattttaatttaaatgttattatatatggtatatatgattaacgctgtgaattcgagattcatattgttcattttaagataagattatgtagaaaaaatgtaaataattagcaaaaatatactatttattagttatatttaatgttaatatttgtaacgaggatgattggcgagggctgattaaagtttcactttatacaaaaaaggggcatgagggagaaggttatagccaattgtatagaactgaatacttccgtattaattaaaatacattgattactagatattaaaaaccaccgggggagattagagtgaagtcatttaagagagtacttatagtagggatggcgttgactacagtatcgattttgggagcttgttctagcgatacagacgtattaacaaaagcaggagcaaagcaaccagcgaaggcggaaggtgaagtactaaaagatcagaagaaaacacctatgactacgagcaaacgtgaaagtattaaaaatgaggatgcaccatcatcacaaaagcgttatatttctcatgatgaatctcaaaagattgaggaaggtatgacgtatacggatattcttaatacgattgactatggtggtgagaacataaaacattataataaccatgaaaaacgcgtattttatactgaaaaagatacggatggtacatatgaaattatggttgaattaaatacatatggttacgttgtaaatattgaacgtactgctataaaggataaagataaagataaagagaatcaggtatttacgaaacgtagtgaagagcctgtaaaggaatatgaagaaaaaaacgatcgtgtaccgtggtataaagatgtaaataacaattcggcagcagtaagttacaatcattatttgaaaatcaaaaaaggtatgcccgcgaatcaggtaaaagctgcaattggacagccacatgtgattgagaaatataaatcttattcagtatatgactatactggttatggtggagaaggatcattacgtgtaatctttgaaccgaatggaactgttacggatatagtggaagacagtttaccacgataataaattagttacgggaagaattgtagtaaagttgtctttgattttataaagtttttgggagcatctccgaatataggtgaaaaaataattctcttagccatgttaactacagtattagtatttaccgaagtttcttccaaattcaatagcgttatcgtggatgttgttgtcgtattatctttgttgatatataccgcagtagggcagaaattgtaactggacgcggaggagtagcagcttccttttaaaagaaggaggaaaatatgatggaggatattcttgaatttatagggagatacgtaattaaacctattattagtttagtgagatatcttgtaatagagattataattgagggcataatagaaggcgtaataaacggtataaggaaattacgtgataagtggcgaaattggcgtgaaagacgttattggcggtagtgtagctgatgagcgtgagaaacaaaaacgttatacagaagcttaatggaatgacaatttctaaagtgaagaaataattattatcttacaaaagtgtaatgttcatgtcatgtttttgaatttcttctttaagctccgggctttaagataagaatataagaaaaaacatatgaggtgaaggaaatgaaaagatacattgcactatttagtattttagttgtatttgcaagtttgttagttggttgtgatttaaaccgtatgggtaaagatgagtattatgttcaaattacagtagatggaaaagaatttgatagtaaagctagtaatgggcagaaatttaaagattatgaatataagctgactggctttgataaagacggtaaagagaaagaattagaattcatagctcaaaaaaatcttcgtaaagaagcattcctacgcgtataccactcagataaaaaaggtgtaacagcttgggaagaagtgaaaaaagacgagcttccagcgaaagtgaaagaaaaactaagtgtgaaataagacagataaaaaggaattgacgaacagggtcttttctaaagttgtaatatcaacgatttatagttaatcggtaacggtttggtaacaattatagcaaatctttttccataaacgcaactacttctgcttgcttcgaaggatacaaatggctataagtatttaaagttgttgctacatcagaatgccctaatcgctgggctacaaccagcgggctaacacctttatttattagataagaagcatgagaatgtctaaactcatgcattacaatctctttaaccatagcaatctttagatagttgttgaattttttatgtaatgaagttgtggcgagactatcatagaattcaccaaaaacaacataatcatttttaactggtgctgttagtgcagcatctttttttatactttttaataaattcattacaaagttaggtaacataataattcgattagaagctttagtttttggttctgtaacttgacgattgtatttagttttgtgaatgttaatggtcttttcttcgaaatttatatcttcccaagttaaagctagtagttcgccttttcttgctccactataataaagagttgaaaagaatgctttatacatgggctcatctaccacactgataaactgtttaaattcttcgaattcccaaaagttaattcttttctttgattctttttgaaaattcccagcaattcttgctggattggttgttaaaccatgaaattttatcccaaaattaaatattgctgagagtgtagtgtggaatttttttaaatattccgcagagtattcattgatcattttgttttgatagtccattacatgtctaggtgtgatacagtcaattttcatttttccaaattctttcattaaatgattgtagatggcattttttatggtatttattgaagattgtttcctcctctgcgtataccaattgaaataactatctgcaacgtgctcaaatgttagattggagtttgattctttttcaactaacattttagcttctgcttcacgtgcttctttttttgttttaaacccacgacgttttacttgcttggttgtcccatcaaactgacggactcttactacgaagaaatatgtacctcgtttgtcatccttatagatcaccataggggttcctcctttatataaagagtgataattcaatttattgaatagattatagcttgtttgttaccaaaagaaaagatgtcccaatgagaacatcttaataatggatttaagtttgaagaaataaccattggtaaacggctaattttatgttatgccatttgttaataaaaggagtcagtccaataaaagaatccgctgcaatctgcaacggattctagtcttagaagtttgaagcaactaagacgttttgtgatggaaattcgattataacatatgacgtttaaaaaccaaatggaccttataggatttgaacctatgaccggacggttatgagccgtctgctctgaccaactgagctaaaggtccttgtatgaatagtatatcagcgtgtacaaaaaaagaaaaggcacaatcaatatgaaagtgtcttttctttcagcttaatattcctttaaataaatagaggtgtacctcttttatcaggatgtaaacacaacctataaaacagaatcatctttaaatccagattgttagcacacacaataaaaagaagcgaggtaaatatttagataaacgctatgtcactagtgcgattgacatattacgctcttaataataagagaatctgatttatagaatgtatccacgttttttattgtactacttctattatgtacatggtgtattttttggtgattatgcaaaattgcattattgcagtttctataaaacacaaaaaaagacatccaaataaggatgtctacgaaattaaaccatcttacttttaataacagaagagtaagggaactcaattattattaaaccatcatattgataaaaacagaaaggatacttttatattatcatatagtgctatctgttaatattgataaaaaataaaagctaatttttgggaaagagataaaatttaataattggctgggtgtggatttttcgtaatggctggttttgtatcactaaaattgaaatatactaacaaaacaatggaggaatgggaaacaattgtcattttagagaaacaattgttgaaaaaatcaaaaaagacaattattttaaaggggattgtgttatattgggtgcgtatatccaattatggaagagaatttgcagtttcgaaagtttatgaaattaacaaaataatattattgaacataaatatagacccatagaagcgtgtgtacaagtgttgtgaccacaattacaccgttccctaaccgtaccttaggaaacacttgcctcgtatgagtccatcttattatatcatacattagcaatgttccttattgaaaaataagttaggatggaaagtttatgttcggagaagggggaagtgaatttgcaacatgtaatggatcagttgttgaaaagaatagaattttgcggatattcaagaaggaattttgctgagaaaatcaaagtaagtcgtgaaacattcaggagaggacttacttgtgaatatgaaatggatgtagcagtattttttcaatccattgagattttatttgagcatccaactgaaaaaagaaaaatcataagagaatttttcagtatgtgtgaaagtatctctaacattgaagtggctttaatatattgtcaggttcaaggtgaatataatctgatgcaacatttaataaaaaagcatgaaagtaaaaagaatttaggaattttctttagcatatataaactttttaataagaggaataaaaatgagttaaaaggacaggcactgcacgatgaattgaacaagcggcgtttttcttcgaatccacattgccaggtgatggtaaatatactgtatatgctagcattagctgataagccgaataataacgccattattgaatatgtagacgctgtagaagcaaatttaaaaaaaatcaaaaaaggtcatattaaagattatcttagtatgctagcaaatgaaagaaaagcatacatgtatctttggagagtgcaacttgatgaatgtagggaaacatgttataaaataattaactcttccctagatattccaattgtcaaagcgacatcattatgttgcgttggtgaatcttaccagttcgagtcgccgattatgtctgaaaagttcctagaacaatctattaaaaaattagaagaagttaatgtccctgtaaaaactcaaaagtatatagcttttcaaactacattggcgcatgtaaggataactaacaatttaaacattgataagattgatgttacggtaattcatgaaaatgaacaggctaattatgaatataactatggtgatagagagttaggagtttcaatgtttgaacagatgaaaagaaaaggatttactccttttcaacgtctttcttattcaaaatgtattggtgatatggaaggaattaaacaagctctactcgaatttgaattagcagggttaagtttttatggacagttatgtaaggatattttaatgaacaaaggggaagtgctacaatgaaaaagaatttaattgcacttttaatgtgcgtaggggtattaggattcggattatttggagaagttaatcagctagaaaaaacaaatccagttcagtatatgatgactgatcccggcggaagttaatatagttactataaaaaagaaagtcgctacttcggtagcggctttcagtgcgtttaaggagtgacacaaataaaatcacacgtcgtaaaactgtgtcgcctgatttttgattaaaatgaataggaggaattttaatgttaaacactgtagaggtagatgttaaagaaaaaataagtgagttagttgaacttgcatataaaggagatcaagaagcaattgaaaaaataatcaaaataaaaaaagaacttggtggaagttaatctgccaagttctttttttatagatcattgatcatatttataattttgcttcgtttatcagcaggaagctgattaatacgtttcatgatatcttcaacatcatctgttattttttttgatgtttcttcatcaaaagttttatgctttgaaagccccataatataatcagcggaaacgtttgtaacacgagctatattttctaccgtttccctactaggttcacgtttatttgattcatatagcgaaatcattgtgtagtttacaccgacagcatctgcaagttcattttgtttcatttttaaagatttacgaacctcttttatacgactacccatagtttcagacattattaaacctccttttaactttacgtttatttctctctttgttatatataatgtacaataaaactttgcttaaagacaagtttttttattttttttagaaaatatactttgcaacaagcaaatttaattgtacaatgtgtttaacaaaagaaaaataaagagaaaaagataaacaaatactttgcaacaagcaagtttttattatcaaaacctttgcttgttgcaaaggtttagggaggtatatagtgtggataatgaaaaagacttatctgctcgagaagcaaaaaaggcttacatgcgagcctggagagcagctaataaagaaaaggttaaagcaactcaggaacgatattggaagaaagtggcgcagaaaatgaatatggaagaaagtgaaattaagaatgattacaatcgcaattggtatcagaaaaataaagataaaagaaatgattacatgcgagattattaccaaaagaaaaaacaaaattcttaaggtaactgaaaaaaggtgataacaaaatgatagaggaaagcacgttttcattaatgatagttgcaatcgtgatttgtatagtctctttagcagtttgttttttggatgagccaattgaaaagtttataaaggatgatgatagagatgtataaaaacctatttattgttcgaagagaacatcgtatgacgcaagaggatgctgggaagttagtaaacatatgccagcaaacgtattacctaaaggaaaagggaaaacgtgattttactcttacagaagcaaaattactcgcacaacattttaaaacaacagtagacgacttatttgcgaagtaactggaggggaattttaatgaaaaacggtaaaaaattgacaaaacgtgaaaaaatgcaccttaaatcatacaaattgaatcctgataattggttaatttttaagaaggtagatggcgaactacatttagtgcatcgtcatacgaactcaatacgagtcattccaagtgcataggatggacaagcactattaaaaatgaggagggtattatatggattaattaacagtagcaaacgaattaaatattttaggacaacaatatattgctggttatcagttcaccggaattgagggtgggttcggcaaaggtaagaaagctatgttagttaaggaaattgccatcattcatgataagccaataaaagaaattaatcgtcgtattaatgaaaatcgtatccgttttatggacggaattgatattctcgatttaaaaagtggtgcttttaacccaccacaattattaagtcttggcttttcaaatatgcaaatcgcaaaatctaataacatataccttctatcagaacgaggatatgcaaagttattaaaaattctcgaagatgagactgcatgggaattatatgatcaatttgttgatggttatttcaatatgagagccaaggaatatcaacaacaagtgcctacagatccaatgagtattttaaagcttacttttgaagcgctagaagggcaaaagcaagaactcccaacatatttttctacataaaagtatctttttccgtttgctttgtaatttgttaggaatgccaaaatgataatctcctcttagtttttttagagttaaaaatacattttaaaagattaaattttaagttatatatttaattttaactctaaggggttaaaatttcaattaaaacaaataaaattaaataataaaacaatatattttatttttaaggttaatattaaatgtgaatatataaaaaataaccttaatattatttaatttatgttttatttgtataaaagtatccttgtaagtaaaatggtatgtacattgaatgaaaaggagtatgaaaaatgaaggtagtaagtaatattcgtatgattatggcgaaaaagaatatagataatatttcggatttggtgagaataacgggagtaagtcgtaattctattaataagttgtggcacaatgagaatgtgtcttctttaaaattagatacattgataacgatctgtgagaagttggatgttgagttattggatttaattgaatatattcgagatgatagtgagacaaaataatttaggggctattttagctttagatagcttgtgtatgatgaaagcatatttttgctaatcgacaatgagttatattcacatatgttttttttgtagggctatatgtgtatttaaagttttgatttctatttgttattgtatgaatatggtttgaatgtggtaaatgaaattatagtcttgctaggtgcgtcaacaccttggaagatgagcggtactggcatacttcgtgatttcattgatagtagtgcagtaaagtgatggaattgatgagtattgaaaaagagttcctgtttgggggctctttttttatttgttactaagtatttttaaatagtgaaggtgctacactatttaaaaatacagaatattaaaaactttatatatcaactgttgaaaagttagtcttatacaatagcatgataacatgatagaaaataaaatatagataattttggaaaaggagaagattctatgaatgttcaactaggaaacgaacaaattacaaaattattaaatgattggtatcaagaaattcgagcgcaacacattattaaagcaaaacaattaaaacaaaagattgaaaaagaaattaacaacatagaagaagaccaaaatttacttttatattattcacttattgatttgagatacaagattcttacaaacgactatgcagatagagaacaatctttagaaaaaatcgaacaattaaaagaacacacaaataattttttagattactattatcatttctttaaaggcatgcatgcaatgaaaacaggaaattatagtgaaactcaaaaatattatgatatagcagaaaaattactagaagaaattcctgatgaagtagaaaaagctgaatttaattatgctgttgcaactttctattatcatactcatcaagccttattagcaactcaatatgctaacaaagccaaaagtttttttagtgggaaactaggatacgagattaaaaccggagcatgtgaaaacacacttggtatggcttgtattacattaagggaattttctgttgcagaagaatacttgctttccgcaattaataaatttgaaaaacacagtgaaaacaaattagctttaatcgtacgttataacttaggtcttttatatgcagatcaaaatctttctgaacttgcaatccgttatcttcttgaatcctttgaaaatcaagaagacgattacaaaacaatgtttttattagcacaagaatattacaagttaaaacaaacaaatacagtaaacacatatattgaaaaagggctaaatgtttgtaaccaagaatataaaattcatttcttatttttacaagcattaaacaataaattatctactgaacaattagaaaaagtcatgttagacgcgattccatattttgaaaaacaaaatctatggaaatacatacaagattatactgaagaattggctataagattttatgaagaaaagaataaggataaatctaatgaatatttttataaaagttacaaagctaaaagaaacttattagaaagggagtcattgaaatgatgaaaaaatttagtctgatactaataggggtagcatgtacaacaggtattttcttttcccaattcaataattccattcaaacacatgatgctaaagaaaaaaatgatattattcaacaatatgcacatggaaaagatatttaaaagcaaattccaacaattagcaatcgacctaaatattaggattattaacaaaatattgaattatatgtaaattaagtttattatctattttgaataataaacttaaggggatgaaatttatgaaaaaaattagtattgagagaagtaattggagaaaaacatataaaaaaatgattccagtattgttagtcggaggaatattggcaggaaatgtagcatttgtgacaaataatgtttttgcggcaactacaaataacaacaatataatacaaacgaaacagtctctcgtttctggtcaagatgaaaagagcattaatgaattagcagaagcgtttcaatttatgcatgaagaagccgctatatataataatcaaggtgaaattgttgattttgattttaataaaatagaagcgaaatatgggaatgatgttggtttagatgcacttaaacaacaaattaaaaaagataaaagtgatattgctggtttatcttttacaagttgcatgaaagatgctttatatgacttttttggagtaaatgctgtacaagccgcatttaatggtggattggcatattatcttgagaaaaaattatggaaagaagcggctaaaataggcgttaaattctttataggaagtagcgtagcaggtttagcggctactttagcttattatggaggtaagtgtgcaatttatggataaaagttcaattttaaaacaaatgtattttattttatttccggtaacactttttctatctctaaatatttatcaatggattgttaaaagtgattactcatttacaggatatataatccaaaatttaattattgtagcattagcgttagtagcagctatcatagcttatttaattactaaaaaaaatatttaacacataatgttagtctaaataacagaaaattctaacccttattcttattttgtattatactggttatgtacaggtaaaatggtttacaagttaatttttcctcgtttcaaaaaaagtccattcttttcaaaagaatggacttttttcttgttatatttgctgtaactattaaaagggcatcaaaacgatctacaaaagcctcaagacgacccacaaaccatctttaaacggtctcaaaacgaactacaacccgaaaaaacgcatcccagtttttttaggtttaattttaagcgcataccaagcgcatataggcgcatacgggacacatacaaagtgccgaaaaacgcatataggtcgcatacaaacggtagaaatacatccctaaaaatagagtgatagaaacccaataggcacagcctatttcaccactttttttgcaaagtgggattcggtttccttatgctctttttttatttttgctttttaagggtcttataatcgtttttaagtattttaggatgttgggtttcttaagggaactagaagttcctagaatggattctgagcgttctgaggtgtatttttctatggattcgatattggaattgctctaggaatagttgtcgttttattctgtggctgttccgacagtggttctcataaagaatatgattgtatcaatagatttgatgatgtttgaaaaatagagaatagttgaagctcttcctgtaaaacaaaaaaaattatgtttgtagaggaagtagtcatttcactacaagaaaattcccatagatcggtggcgagttgaaaaatgttgaaggttggcgaggacattttacgaggacgcgggaatggctttgtcattgttggggttaatagtttttaagaaaagttggttagtagctgaaaaaaatagggaagattggcgaggatgtattgcatggcagcgggacatgttatgtagtcgtggtgaatataaaaagagactttttaatacatggatgtcaactgtaaaaagttagaggtagttgtatgatgtttgtccaacggtaagcggaacgaagtgagcattaaggagtggacgaacccactgtgcccagaaccctcttggaactccaaaacgttagccgttttggggatgccaaccggcgagggagtccctcaaggattgaggggttggggagttcgattgaaaggggtcaaggggaagagtttcccttgtgggtttgggcaaagcccatgattttttttgccatgcttgttatggctcggcggtagccgaaatgtcccgaagggcacacgtgtttacgcagtaaactgtagtgtgctactgtttacatggaactacccccgaaaaaaaggagcgaggcccatgtcgaagttcgtgatttgccatatgcaaaaatttaagatgagagatgtgaaaggattacaaatacataatcaacgtgaaaaagaaagtcattccaattcagatattattcaagcacgaacggaacagaattatgatctgattcatgacaaagaaaaagtggattataagaaattaattcaaaatcgaattgataatggtgttgtatctaatcgtgcaattcggaaagacgctgttgtttgttgttcgttcatgatttcggctagtccggattatatgaattctttatctcaagtggaacagagacgattctttgaagagtctcttcgttttttgaaggggagatatggagaagagaactttgtgtatgcttccgtacatgttgatgaaaaaacacctcatatgcatgtgggtatggttccagttaatgaaaaacaaaaactatcagcgtattcattttttaaaaacaaatcagagtttcatgatttacaagataaaatctatgaacatgtgaaagaaaagggatttgatatagagcgtggtgtttctagtgatagaaaacatttatcgacgcagcggtttaaagcggtgactttacaacaagaaatagaagaactagagcaagaaaagaagggaatagatagtcgtcttcatgatttaaaaatgtctttagatcaagcaaaaagtgtggatgagatcccagttaaagaaaaaggtgggtttatacgctctaaaacggtcgagattacctcggaagacttcgaaagtataaaagtattagctaggtcgtcggaagcccttagagaagatgttagacgccttaaaaacgaatcaggtgtaattacacgtgaaaaagatgggctgtatagagagaaatgtattttagaggggcaaataacagaattgaaaagagagaatcgaggattgaaggaagagaatgatttctttaagaaaacgttggaacgagtgaaagagttgtataaagaaaagcttcctgaattggctggggtgattggttacgttaaggggagtatattggacaggatgaattgcaaatttttaaaacgatattttactagtgatgatgaagtgagaggcgctcaaaagtttttgaatcataaacaagagcatgaagaacaacaaaagagattaaaacaagtgcgaagtagccaacagaaaaatcgggaccagggattggagagatagtgtggttctgtttgagttttttgttttttagatttatagcgttagcggaatttgttttttataacttgcttaagatgagtatgtttctcagatgttttatccgttaaaaaaaatggttttgaacgaaaaaaaatgcccctgtccacggagtggatttaggggcatttttttatgatttttcgtgttcgaaaaatcgagttttttctttctttaatacataggtaactatttcggcaacgaaattgatgcctatgtattcttttagcccttatgtatcaagggtttgtaaaaaaaaagacttgctttttcaggcggatagatttatcatttttagtgtcgaattaaaaatcataaataccacgagaggagcaagtccaaaaaaaggattcgtacacccttttttatatcgaatatgaaattcagaaattagaaattctgatgtttttcagataggactaatatatcaaatatggcaaagaaaaatcaagatgaaatcactggtaaattacaacctaaaaagaaacagaatatcaagatttacgaatttataaagaagaaaatgagtgagagcgggaaagaattgtttaaatcgtgcagtatctttaatgaatttttggctacaaaggataaaaagaagaagaaacgagtaaaggggaatgattgtaaaaatcgattttgtccgatttgtgcttggaggaaagcagggaaggacgcggtgaaaatcgcaacgatgatggaagcaattaagattgaggaaaagaaagagtttctttttttaacgttgacgactccaaatattaaagctgatatggtgaaaagtgagattgatagatttaataaagcttttaaaaagttatttgatagacgtaatattcaacgttctattaagggttatattagaaagctagaaatgacgtatgataaagaacgattcatcactgaagaaatgtataacaacaaaaagagaaaagcatattatgattctcgtggattgaaagtagacgatcataacccgaattatgatacatataatcctcattttcatgtattgctttgtgttgataaaaattattttaaacgtaaagagctttatattaagcaagaagaatggttagaaatgtggcgagaagtaacagatatgccagagattacgcaagtacatattcaaaaagtagagttaatacgagaaggaaatgcagttgcggaggttgcgaagtattcagcgaaagactatgaaatgtcggttagtcaagaagtgtttgacgtgttctatttagcattaaaaggtcgtcaattaattgtttacggtggattattaaaagattatgcgaaaaaatatgaagatggcgaattggacaagtataagagtacagacaagaatgaatattattatagattaatcgcaatgtggaataaggatttaatgaaatttgaacaagagtatcaagagttatctgagagtgagaagcaagagtataacggtcatttaattaatgaagtagatgtggaggcgtagtgtatgaaagtagcgggagatttatattattattgtcttggttgtaaaaagtttcatgaatatgaaaaaattgatcataaaggtgtaaatagaaaattatgtttttattgtttcaagattcaatctaaaaaaacgaaaattattggtgatgctgaaggtagaatgcaaatttgtgagacttgtcataaagaattgttttagttggttgatttgtgaaaaaagcaaagtcaaatgttagaaatttttaataagggaactgactgttatatcaagtcagttcccttattttattgagtctatttttgagtgcagcaagtagcattcaaaagtttttttatgatttaacaaaaaggagtttttcttaaatttaaatttcgtgaatttgtaaatttatttttaaagtttatttcgagatatattttgttctactaattttgttttactaacgtacgaggtgaaaacttaaagtgtgcgcatgaatttttttagtaatatatattacgataaaataccgcacgttttttgatgatttttttgaaaatatagttttgagaaattctaaattttcggggctgattttggattttttatgtgggatttgattttggaatttgttaaattggaaatctcgatttttcgattttcggaatttttgttttctcttttctttgttattctgtatttcgaaattaaggagtttatataataccttcatgacgaactgaaaacgaaaaaactttgctcgcatatttaattcatagatatttcaatcttctgcaatatctagtaagacttgcactgaatttgttccaccttctcggctgcacacttccaacatttcatggaagaaaaccaattctctaaagttaaacgtttcattgaatcctctaaatgcacgatgcattgtggttccaccttctaataaaagagaaactttctctatttcttcttgaatgctttcatgcatcattggcttcacctgaactaacacccgttttgcattgttactaatttgaagcgcattcgctactgccttcatatagatagatagacggtcaatgacaaccaagtagtaacgtttttttcttcgatagagaagaaatcttggaactaaaaatccacataaaacggaaattagtgtaaaaggatctcgtccaaaggaaaaatagaataccgccgcaatactcattccagaaagaatcgtatatacccagtacatgcctttcgtcaatttccactcgtacttttgggcttcttggataacggattgcggtagatacacccgtatccccttaatattccttaactccaagcgcctttcttctttctcattttcttgtacaaattgggaaagagcagaacccttagattttgcaaaaagtaaaacgagcaatactacactgataaagattaaaaatatacatccataagccaacaaactatgcatactgcacctcctgttgtgaaaggaatggcgcataaagagctggatttacagtagaagaacggaatttcttctccatttcggctgacatttttgctgtaacgatatgatccccatgaatctttcctactctctcatccatttcatcgaattcctcacctgaaggaataaattgagaaagctgattgaactgtatatcatcttgataatctaacaattcaatcatctctgtaatatagcgattaccatcatctttcttttctaaaaagacaatcacatcaaatgtctgagaaattaattcatataaatactgagcatcgatattcgcaccactctgcagacacatgagcattaaacgtctaactgcttcttttgcacttcttgcatggacagaggtaaagccaggatgtcctgtttggaagaagttaatcattttcaatgcttctttccccctcgattcccctacgattaaacgttttggtccttgacgtaaagcatttgttaacaacctatcaaaatcgattgcattttcttcaacctcggatgccctacactgcatcggaacaaaatgatgttccggaaaaatgcgatgcaaatataattcagggttatcttctactacaagagtacgttcttttttctttcctttcggaatgtgagaggcaagatatttcataaactctgattttccggtacctgtagctccagcaactagaatattcattttggctttcacagctgcggccaaaaagttcagcatttctttcgatgcttgattggtagttaacatacgttcttcagaggcacggaggtgatctgcattcttacgaatcgttattgttgttccgagtcccccaagttcatctaacgcaatattgatacggatatacggaaacacgcagtcaacatatggctttgctgtatttaatgactctgatgtactgtttaccatcttataagctagagctttcacttcttcttccgtctcaaatcggtaaggaaatgtacattctccctccccaattttttcgtaaatgatttcttttgtgccattgatataaatatcagttacatctttatcttcttttaaaggttctataatcccaaaccccacaatttcgtcacacaccatatttagtaattgttcagaaggtacctctgaaatgacaacctgattactcaataaaaagcttttaataatttgttctacagctgctctcttttctttattcataaaggattcacttaggatatcacgatggtcttttactaaaaatgcacgaatttcatctgtaatatctttaatttgttgagctgtagttgttcctaactttcgagctgatttggaacgaatcatgtaaccaaagtgatataaatccacttgatttcgctttaaggcgatttgtttttcctgtaaatagccccacatactccttgtcccccttttaatttcgtaaaccaaagagaccctttttcatagaggattgctgggatggaataccaagaccagctgcttccataatgtgatggacctttgtattaatttgcggggaaccaaattgcatcccccattcgtaactcgtacgatctctgtcatacggaatggttactgctattttttgagaagaaagcttttcaatatcttctacataattttcatctgccatgttcaaaacatgaatcatacgaggcattgttagctttgcatcttcaatcagctttaattctcgcttaatagctaacgcaccacgaggatttccgtttagcacatgaacaacaaggtctgcttggtataggattggataactcagcacctcggataattcagttggcaccgatagaatgatataatcgtattctgtgtccacaagtgactccataaatgtagttacaaacaattctttgttttgaatctcagggaattgagctaagttataacctgatggaaatactagaaaatccatcttatcgtgtaatttttgcatcaaccttggattcacttttttctctagcaaatcttgcttcgtacaaatatactgcaagaggttgtaatcattttcttttcttacaagctctaatatatttttactatcgtggctaagaccagttccaaccgcaaagcttggccttacttggtctgcttctacataaagtacctttttccctaaatgagctaactcatttgccatcgcaatacttaacgtgctttttcctacgttttcatttgtggcataaaaggcaaccattcttacttgccgatccatcttaaaaactcctttcttacttagattcgctcagatactgcgctacatactcttttacatttttagaaattggattggtcgaatgcttctctacatagtctaaaatgttcttttgatcagatatttgcgagaacccttctgctggttctaattctttccctgtttgttctattttttgtccgactgcaacaggaatcacatctccaagtgtttttgcacgatttaagtattgaagttgttcaggtgaaacagctagcgtatataatcgcgttactttgggcttttgttttccttcttgttcttcttttgattctttcttttctaatacaaatgcatcttctgtattgctatcttttgcggccgtaacacgtacacgttggaaaagaccaccaaacacaactttctcattgtcgccttctttcacaacctgtttgaaatacaagtcgacatacgtgttcggaatgatactattacctgaacttgtttccaaatcaacgagtaacgggaatgcaacttctccatcttttaaatttaaaatggcagagtcaggtaactcttctttctttactactttgtttttaaagagatagctattttctgtaatgggctgcccatcatttgtccacttacctactacttcttttttatttgcacgtaatacattggggggaatcgcatcaccaggtaatgttcgttccactagcatgtcttctttaatctctgtatgcgcaggtatatcctttgcggctacaacaatctttgttggttttactgcattttcgactgcgaaatgattgtacccatagatacccgctactgttgcagcagctaaacctaccgcagcaatctgcttcttttgaaacttagatggcttcaatgtttgtattcctccttatgtagcctttaaacgcaaaaaaaggacacacctatggcataatgcgccttaggtgtgtccttttagctaatctaaagtctatatgaaaatgttggatttggtttctttaatattacaatttcaatattatgatatatagagtttcatgtcaatcatttctaaaaaaaatattatttttaccatttcaaatctctgatcccaaaacttgaaaaaccttaaaaacgttgtcatatcaaggtttttaagctattaacccaactataaatatggtataattaatataacgtaactgaatatttcagggtggtcggttgctatcctttctctttcattttatggagaaaggaggtgatcgaatggatatacttttcacgatagcaattgagatactgaaagtaattgctagagaagtcgctgtattttttgcaaaacgagtaggtaaatacctatcaacgtcttggaagcaaatacaaaaaaagcgacgaaaaacgaaaagaaccacccacaatgccggcaagcgtttgaagggtgattctaagaaaaaataaactcttttttagcaaccatccaccttgcggtagcagttacataaggcgaagtgttaccagcacttcgtctttattagtttatgcaaaaactatctttataatacttctacacatattataacaccaactatagtacctgtcatgtatattcatccactatagctagttaaataaaacaaaatacttttagttcgaaatcaatttcgttcctgtttcaaaatactttgcgggagcataactcttcccattccgatcctgaaattcgcttccaatgtatagcgatacaatcattgcgacaacccccataataatcgcacgtctaacacgttgttttttctttttatccactctaatttcccctttctatgaaaaaaaggcacatcccattaagggatgtgcctttggtttatccattcagctactagtttatgatggatatattattgtgtcgattcatcaaattatactatattttatttttatttcccagtcttcatgtaataccaatcagtcaatttatgaagtagttcttctttccctacccagttccatcctactccacttcctccagggaatggatcatcaggaaatactcttctttttatgaaatcatcgtacgcaacacccttaatctctacttgctcagttaaacataaactcatttcattgatacctgctggagctgtttctacattaaaagtgtatacaccatcttttgtcttcaatggtgaataccatttttggccaccatcaataattttctcttgtccatcccaatataaagacttagttggtcttttactatcaaaaacatgtcctgttgcttcagataaatacatatttttaggtaggaacttcgctgtattatctttaagttctttcttctctaaatcttgagtagcctttaatccttcgtctgcaaatggatattgtgccttagcagcagcaaatacaccagggtaatttgcattccagtcatttttatattttccgtttacttcatacgaaaatccataaccagaatgtagcttagaaggagctaaattatcaatactccctgtcaaagtttcataatacatttccccagttatatcttcttttgatacacgttcacttactgtttctactacaccttttacactcgttacaccacacattgccttttcttttgaaggctcatagattgctgttttaataggattatttttgtatgtagtttcctcgatgtctatacggttaccagcagggttaatttccgcttgaattgttcctttacctttatgttgccagtcaagattcagggttttcttttctccctcagttaatcttaccttttgtaaagctacttgttgtccgttatgttttaacacaactactgtttcaggattcgtatatttttcttctaatacatctaactttttaattttattcttctctttttctaacttctgtcttgcattatctagcttacttgccgcactatctagtttattttcttcccaagagcagtctctatcataatagtgatcctttccctcggcatctacttcatgaattggattacggcgacaataacttagactagattgagcgctatctctctccgattcagagctatttacttcttgttgagacttattaatattgttgtttacctttgctctatattggtcacgttccggtttaaaattatcacgtgatacatctattcttgtttttatattctttccttctcttgctgtttctccttcaattcggtcagcagagaaatcgattttatatttaaaatcatcgtcatcacctggatctggattaggtgttacttctgtaccacagttaccatttatggtgaaatcaacagttttctcatttgattccctttgaacagcatcaatgactttaattttcgcagtatatcggccacacatttgtggctgccactttagttcttctgacttaaattgccctgcatcaccttcatttggtttttgattatctttttgcggagttgaacgcagataattttcttgatgatacacggtttcgccatcttttgtaatatctaacatccatttaactcggttccgttcacctgcagctgcttgatatggatttactgttgtgccatttggatcccgatcattatatcctttatttttacttacatattcgaatccgttaaatgtaaatttcacaggtacatctttttttccactcgtagccttaaaatcttttatttcaggtttacttgtgcgtacataccacaagttatacctatttacaccatttacactaccagcccctgcgtatcctccagaaagataggcaatatccctaatccaatagaaatgtccataagattcaaaggaatcttgatttgtaatcttatgtggaattaaatattttaaaacaaactgagagttaccccaatatttatccgtaattatgctatttgtaattctctccacttcagttaccattctatctcctactacaactgaagggttaatgtagccgtcatttgatatacgcacataaggctctgactggtcttcattatggataaggttttcccttggattcccccaattaaaagaaccattataaacagcaggaaaatgtatatcagctttatattcgaactcttttggcttatatctacttccagacctaagtagttttccctttaattgtaattcgtctgatgctaaaatcgtagtttcatttccattataaaatggtacatcactatttcctgcacttgctactgacggtaataacaaaattaaagaagtacaggttaataatatttttttctcagtttcataaaatccctcctttaaacataaaaaaggacacacctgtaccttgggaggtacgtaaggtgtgtcctttacgtaaataaatcaaatttatttatttattattatattacatatattaatatatcaaatgaagcatttaattgcaatgatattatacacgtacttgaacgtacatcatgtggtcagctgtagaatgccctacacggatcttatattttcctttttcatagttatttatttcttgagcatctacagtttcttgaatttctttatctagaactaaatcagaatttaacatcgtagtccactttttagctaattcaatagttgcttcgttattatctaagaaaataattttaaaatcattctcactagtagcattaacatagacttgtgccccaattgtaccttctggtaaatacatgtttttatcaattattctaatagttccatttaaatctgcatacttaaggttagtgccatatttagcattcacactcttgataagattttgcgcttctgtagaaatggatttttgagcaatcgggtttttcatagcgtttggattatacgtaacttcttctgtaactaaacctttatctaaacttgatggtaaatttgtatctggtttttcttcaggttttgtttcaggttttggatctggcttcacttctggtttttcttctggtttaggatctggcttcacttctggtttttcttctggttttgggtctggcttcacttctggttcccgccataccacagatgttccagataaatattggaagctatatacgtactttgtttcaaaatgggtcaatcgagaatatcgtcaactgtttactaaaaatcagtttcatcaagcaatgaaacacgccaaagtaaacaatttaagtaccattacttatgagcaagtattgtctatttttaatagttatctattatttaacgggaggaaataattctatgagtcgcttttttaaatttggaaagttacacgttactaaagggaatggagataaattattagatatactactgacagcttccaagaagctaaagaggtccctagcgcctacggggaatttggggtacattgaaaaaggaagagtatgagtattcaacatttccgtgtcgcccttattcccttttttgcggcattttgccttcctgtttttgctcacccagaaacgctggtgaaagtaaaagatgctgaagatcagttgggtgcacgagtgggttacatcgaactggatctcaacagcggtaagatccttgagagttttcgccccgaagaacgttttccaatgatgagcacttttaaagttctgctatgtggcgcggtattatcccgtattgacgccgggcaagagcaactcggtcgccgcatacactattctcagaatgacttggttgagtactcaccagtcacagaaaagcatcttacggatggcatgacagtaagagaattatgcagtgctgccataaccatgagtgataacactgcggccaacttacttctgacaacgatcggaggaccgaaggagctaaccgcttttttgcacaacatgggggatcatgtaactcgccttgatcgttgggaaccggagctgaatgaagccataccaaacgacgagcgtgacaccacgatgcctgtagcaatggcaacaacgttgcgcaaactattaactggcgaactacttactctagcttcccggcaacaattaatagactggatggaggcggataaagttgcaggaccacttctgcgctcggcccttccggctggctggtttattgctgataaatctggagccggtgagcgtgggtctcgcggtatcattgcagcactggggccagatggtaagccctcccgtatcgtagttatctacacgacggggagtcaggcaactatggatgaacgaaatagacagatcgctgagataggtgcctcactgattaagcattggtaactgtcagaccaagtttactcatatatactttagattgatttaaaacttcatttttaatttaaaaggatctaggtgaagatcctttttgataatctcatgaccaaaatcccttaacgtgagttttcgttccactgagcgtcagaccccgtagaaaagatcaaaggatcttcttgagatcctttttttctgcgcgtaatctgctgcttgcaaacaaaaaaaccaccgctaccagcggtggtttgtttgccggatcaagagctaccaactctttttccgaaggtaactggcttcagcagagcgcagataccaaatactgttcttctagtgtagccgtagttaggccaccacttcaagaactctgtagcaccgcctacatacctcgctctgctaatcctgttaccagtggctgctgccagtggcgataagtcgtgtcttaccgggttggactcaagacgatagttaccggataaggcgcagcggtcgggctgaacggggggttcgtgcacacagcccagcttggagcgaacgacctacaccgaactgagatacctacagcgtgagctatgagaaagcgccacgcttcccgaagggagaaaggcggacaggtatccggtaagcggcagggtcggaacaggagagcgcacgagggagcttccagggggaaacgcctggtatctttatagtcctgtcgggtttcgccacctctgacttgagcgtcgatttttgtgatgctcgtcaggggggcggagcctatggaaaaacgccagcaacgcggcctttttacggttcctggccttttgctggccttttgctcacatgttctttcctgcgttatcccctgattctgtggataaccgtattaccgcctttgagtgagctgataccgctcgccgcagccgaacgaccgagcgcagcgagtcagtgagcgaggaagcggaagagcgcccaatacgcaaaccgcctctccccgcgcgttggccgattcattaatgcagctggcacgacaggtttcccgactggaaagcgggcagtgagcgcaacgcaattaatgtgagttagctcactcattaggcaccccaggctttacactttatgcttccggctcgtatgttgtgtggaattgtgagcggataacaatttcacacaggaaacagctatgaccatgattacgccaagcttttatttgtatagttcatccatgccatgtgtaatcccagcagctgttacaaactcaagaaggaccatgtggtctctcttttcgttgggatctttcgaaagggcagattgtgtggacaggtaatggttgtctggtaaaaggacagggccatcgccaattggagtattttgttgataatggtctgctagttgaacgcttccatcttcaatgttgtgtctaattttgaagttaactttgattccattcttttgtttgtctgccatgatgtatacattgtgtgagttatagttgtattccaatttgtgtccaagaatgtttccatcttctttaaaatcaataccttttaactcgattctattaacaagggtatcaccttcaaacttgacttcagcacgtgtcttgtagttcccgtcatctttgaaaaatatagttctttcctgtacataaccttcgggcatggcactcttgaaaaagtcatgctgtttcatatgatctgggtatctcgcaaagcattgaacaccataaccgaaagtagtgacaagtgttggccatggaacaggtagttttccagtagtgcaaataaatttaagggtaagttttccgtatgttgcatcaccttcaccctctccactgacagaaaatttgtgcccattaacatcaccatctaattcaacaagaattgggacaactccagtgaaaagttcttctcctttactcattttaataaacctcctttctctagaccccaagaagctaattataacaagacgaactccaattcactgttccttgcattctaaaaccttaaataccagaaaacagctttttcaaagttgttttcaaagttggcgtataacatagtatcgacggagccgattttgaaaccacaattatgatagaatttacaagctataaggttattgtcctgggtttcaagcattagtccatgcaagtttttatgctttgcccattctatagatatattgataagcgcgctgcctatgccttgccccctgaaatccttacatacggcgatatcttctatataaaagatatattatcttatcagtattgtcaatatattcaaggcaatctgcctcctcatcctcttcatcctcttcgtcttggtagctttttaaatatggcgcttcatagagtaattctgtaaaggtccaattctcgttttcatacctcggtataatcttacctatcacctcaaatggaattcactggccgtcgttttacaacgtcgtgactgggaaaaccctggcgttacccaacttaatcgccttgcagcacatccccctttcgccagctggcgtaatagcgaagaggcccgcaccgatcgcccttcccaacagttgcgcagcctgaatggcgaatggcgcctgatgcggtattttctccttacgcatctgtgcggtatttcacaccgcatatggtgcactctcagtacaatctgctctgatgccgcatagttaagccagccccgacacccgccaacacccgctgacgcgccctgacgggcttgtctgctcccggcatccgcttacagacaagctgtgaccgtctccgggagctgcatgtgtcagaggttttcaccgtcatcaccgaaacgcgcgagacgaaagggcctcgtgatacgcctatttttataggttaatgtcatgataataatggtttcttagacgtcaggtggcacttttcggggaaatgtgcgcggaacccctatttgtttatttttctaaatacattcaaatatgtatccgctcatgagacaataaccctgataaatgcttcaataatccatcctccaaagttggagagtgagttttatgtcgcaaatattaatgtttctggtgaaccttatcaaattttcgttgatttaatagaaacatagcggtaaaattagcagtaacttaatagaacggaaatgaaaaaagccactctcatatgctattggctaccaacctttagcgagaatgacttaatcctgtacagccatacaggacttcgacttataagaggcgccaacttcaaataagttatttgccttgttttcgcgaacaaggcttattagatacacctattgtaccgttactctacgaatatttcaactagtaattactagcattgtcatatacataataaaacggatataaaagggcgttttctatacctagaagtcttgtaaatgtacagggcgtttagatatagagaacgccctttttgtgttccgttccagtggaagctaccactttaaaaagatggtctagtgtagccaatgcaggagagtacactcggatatcagttgtcgttgcattcaactgtctgacgtaagcgaggtaaaggacacaagccttgcataaaacaagcctacgggatgtaaatcctaataatgatgataaccaagacgttagcggcaaaaagtgttgggggttcaaaataagacatgattgtgcgactggagttaaacagttactcgtaagcggcgatcatgacactgattcacggctattcttgtacaagctagctttattacaaggatatgcgggttatatagcgaatcacccgaaagggaacggtgttgggcgtgagaaacgcaccgtacggcgcaatacaatgccaataagctatatacggacggtatagtagttttgtaagctataaccgtttgtcgtcaatgcaaccaatctcaattcgagacctcggcatctaagccagtacgaatgagtgggcgttttaacctcgtaaattttcaacaggggttactatgcccaaaactacattcagatttcctaacaaactcgccagtatgaaaaccttaagaccttaaagtcaagggatttgaaggattttaacctcgattagcaaaaaatgtagagtactgaagcaactaccattaactaagatagtgggggattgaggaagaatccagagctgtttaaatcaagtgaaagacaagatgaaattaaaagaatagtgaaagataggggagtggttctctatgagaaaggaaatggctagagaacaaaggcagcggtttattgatctattgttagactttatggtaaagaatcctcatttatttgttaatggtacagaggatgaaagtaataatgttgttacaaaatgtaatagtgatattaaagaggttgcggagtcatatttaactcttttatagtgagagggttaaaactaattaatatgtattaaggcccaatgttggaattattgtatttcactaggcaacctacttactaaaagtaagattatccattagtggatgttataatattgggttttttaacacaataatcatcgcctttcggtgtcgtttgatagaaaagtaaccattagcgatgaaaaagtcaatataaaaagccatccgtaaaaaacggatggcttaccgtacataggatcgttggtagggcggcgtatcctacatctctggtaacttacctagccaatcaaatgcttgagaacggcggttagataagcgcgtggggaacctttcccacctcaaagatcctatatcattattatgttactttctacaggtagtataccatgttcttatattttagtaaactccccgttagcttaacaggtctttgtaagcaattaaacgtccactattcaatcgtctttggattttcgcaggaccgttttttagatcgaacatagttgataagaacaaataaccgcttgggtccaactttatagcaattagtatatggtcatttaaaatctttaccaattcaacgctattaggttctttaggattttgcccgacatagtcggggtgttcaacgatatcttttatgtgcgatgaatatttttcataaataccaggatgttgtttctttacgtgctttataaatccgggaaacatttttacatcgttagaagtgcaagtcaagttatatgtatctataatgatttgtggaagttttgccacaacagttggtttatttacaatcttttttttattagccgtcaaatttctccctcatctcgtctctttatatctttattttatcataaaggagtatttgaaccgtcgcgcgggacaggtttatgatagggatattttattgaataattgatggtataagggactttcatgcttggaaagtggggattatgaattagatgcttgtccacaatatgttccaatgtaattaaaatttatgttcccaccttgaccaaacatcacgtccatacttaaatcgtccctcctttaataggtaaaatattaatttaccttaataaaaaaataatggataatagtattcgtctgaatttatataatcagggggaactattgatgctggggatactatttacagcggcgccatctactgatgtcgtaaaggatttgcaagataaagttatatcattgcaggatcatgaggtagcgtttttgaacaccacgatatctaatatgttgatccccgaagcaaacttaagagtgtgttgatagtgcagtatcttaaaattttgtgtataataggaattgaagttaaattagatgctaaaaatttgtaattaagaaggagggattcgtcatgttggtattccaaatgcgtaatgtagataaaacatctactgttttgaaacagactaaaaacagtgattacgcagataaataaatacgttagattaattcctaccagtgactaatcttatgactttttaaacagataactaaaattacaaacaaatcgtttaacttctgtatttatttacagatgtaatcacttcaggagtaattacatgaacaaaaatataaaatattctcaaaactttttaacgagtgaaaaagtactcaaccaaataataaaacaattgaatttaaaagaaaccgataccgtttacgaaattggaacaggtaaagggcatttaacgacgaaactggctaaaataagtaaacaggtaacgtctattgaattagacagtcatctattcaacttatcgtcagaaaaattaaaactgaacattcgtgtcactttaattcaccaagatattctacagtttcaattccctaacaaacagaggtataaaattgttgggagtattccttaccatttaagcacacaaattattaaaaaagtggtttttgaaagccatgcgtctgacatctatctgattgttgaagaaggattctacaagcgtaccttggatattcaccgaacactagggttgctcttgcacactcaagtctcgattcagcaattgcttaagctgccagcggaatgctttcatcctaaaccaaaagtaaacagtgtcttaataaaacttacccgccataccacagatgttccagataaatattggaagctatatacgtactttgtcttcttgatgttgcctaacttttttcaaaatgtcctttacaaagggtacagattatattaagaggactttttttctatttcccttatttttttccgcaactgtttgccaagtgaacatgctcattaaaaatgttgttgttaatttgtttttcatatttctttaattcttcattgattttactgccagttttactttcaaaacttttctctaatttagctgctatatctcttagacttgtttgtaattcatgaaatgcccctatgtttttttgaagagcatatgtatcttcttttataatatctattgatttaaaccctacttctgtttttaacatcatacgctgcatttctctttcaatctgttttttagcagcttgtaactcctcaacaacctgactcgctaaatctcctgtcacattttcgatttgcttttctatctttttaatttcccccataaaatccatcatataattatctccttatctaaactgaaaattccccgctaaatgattatctttatccctaagtgaatttgctgcatcactaatttcatccccaaatctacttaaacttttttgttcttttcttaaaagatgaattaattcttctgctatgtgtacatcgtgaaaatagtcatttccaccttctttcgttttggcaattcgtgagatggcttcatctatttcgtatgcttctaatagatgatatttcccacctggtcctgtttcatattttaattgacttttcaacttttgaaccgcttcagcttctcttctttgaaactcttctatattttttgctatatctaataatcgattactgagcatttgaattttttgtgcttgtcttataatatcctcaggttctaattttaatagggggcttccatttgaatgaaatgctcctctaaatgtatctctgccgtgtccgtccatagttaaacgtgtaaaaaaatcttcttttgtatcattctgtctcactgtaaattgcttaccaattagaggtgcaccgaattgagtatggttaccaattgggtcattctcatgtgtataatccgtagctttgttttccatttcccctctatctactcgttttttcgcttcaggacttagcaaacgataaggatttggtgcagcccatgtagttgcataacaatctaattctgcagcgataaggtccgcttctgcaccacctttactatgtccagtagtatgaagagaagaagggttatattttgctacgatgtcattttttgcccattttaatccagtatcaaatgatgtttcagaattaggttttatagtttgactattacttggagtaattactttagaatgtgttttaattccaaacgaaatctgatcgatatctgtttcgaaatctgctaattgcgtaggctctgtaccgcgaaatgctaggattatctcatcataatgtgttgcattttctttgtaatcttttttcggtactactgcaatagcttctaatccattttttactttttgacaatctgcatcaattgattctataactacccatatcttaccatctaccccttttatttctttacctttttttaaaacttcgtcatcataaacatgatctgctaatttgaaataatcttcatccgttgcaataggattctttttaaattcactcatatctttcaactcatttcatggtatattttaactatattcaaatacaaggggattttttatgaagaaaaaattagtaattattttatccattatttgtattatagcaggaggatattttactatggaatacttaaaacaaaaagaaaaagaagaaaagttttggaaggcacaagaggcacgagtagaaaagtatattcattacaatattcaagatgtaaaatcgattacatttaaagaacacagtgtaagtccaatgggtgttcccagattaaaaggttatataaataataatgaagaattggattttatagcttatattagtactacagaaaatttcgaagatgattttacacgttctggagaacttggaaaacttataaaagaccctgaaaagtcggtatctgaaattgaaaaagaagagaaggaaaagaaacaagagtagtctttgtgattactcttgttttttattatagaaaaataaaatatttgaaagtttttaacaatgcattataatatatttagtaaaattaaccaatttatattttgctcattatgtattaaaggggaaatgaaaatggctggacaaattcgtatgtcaccagaggagcttaaatcgaaagcgactcgatatggacaaagtgcaaatcaaattgaggacattttacgtcaactacaaaacttacaaaatgaattaagaggagaatgggaaggccgtgcatttgaaggttttgaccaacagttcaatgaattaaagccaaaagtacaaaactttgcacagctattacaagaaattaatatgcagcttaataaaactgcagaggctgttgcttctcatgatgaagaattatcacgtaatttcggtttgaaataagaaatgttgtaatttctacatgaaattcttggaaaatgatagaaagtagactagtattcataagtttacattcgaagatacataataaaaaacagtagtgattttatacactactgtttttttattgtttcttgcaagtgaattatttatattcctgtctatataatttaaacgaataaatagctccaataaaaaatacaaaagcttcaaataatataaagatttgacggaaattctcaatatctttaccaactaaagaaataaatatagcattcattagaatttgagtagtaaacatacgagaagtaatttttaaataaatagcatttgttctttcatctggtttaccaatttttttgtaaataataataagtgcaattactgaacccaaaaatagaagtgctgtaagtcctacaacgatattaaaattagctgtactttctaacatccatttatttaatagatcaatcattattatcttcctttcctacataagagaatatttcgttcttctttttcactataataaaaaaagaaaaaggaaaacatcgaactttcttacaaacattcgtgtattcttacagttttgtcattttgtaaatgtattcatcgccttgcctttcactattttctttggaaaacatagtgaattacgagaaagagcgctacaagatcaacttccaagaagtagtgcactaaaactcttaattaatgcaattagtttgttttaaagtagtaagtggacaatacttcttagttgtagaaagtatcgagatccctgtgccaattccagcgtttgctgcagctctattaattggtttaggaataatcccgctttgttcttaatttaaggaattacaaacagttctacctttcaattgataagccctcaagtgtatgaatgcttggaggttgcttataaaaaaaaagacgccataaggcgcccccacaattgggtagataagactttagttttccaatctaaagaagttttgtatcagctctttgagagtatatcataatattcggttcatttattatgcatttttacatacctattaaaatacctctattttccatttgataaagtatattaccaaaattcaaataaatatttctgaaaattcaaaatatttacaaaaatcacaaaagtgatacatttaaggtgcaagttataaaaaactattaaagggggatttattatgttcaagaaattagtagttggagcattagcagctggtatcgcattaacaggggggatcggggctgcgtcggcaagtacagaagatacaacaaattcaaaaagcctaacgatggcgtattcctgtcctgattatattggtaatggtaaatatgcacaaactatttataacccaggtggaacaaatgctgtttatgcaaacacatatactgaaatgacttgtcacggaaaaataaagtggtattttaaatggaaaaaagcagacggtggcggttactacgaaggagaggtaataaaataagtttttatgaaaagcctcaatatctgaggcttttttctttgtataggattatccctcataaaaaaagacacccaaaggtgccttccgacttgaaccgctttaattttaataatatgtattggactctcatccaaatattattttactatgttaagtattattggtcattgagaaaaaataaaattactcataagagtgcttattcttcaatctaatgttttttactagattttttatgtcctttatttcgttcacaagccacgccatctccatcacgatctaaatgcgaagcataagctgggctatctggagttatatcatagtaaccggcattatttgcatctgtacagtttgcaaagtgtactttctcttgctgaggtgctgtattagctgcagctttttgttgctcctgttcttttgcttcacctgcttcttgttgtttcttttgttcttcctgttgtctttgagcctcttcttgtttgcgttgttcatctaatcgcttttgctcttcagcctgtttttgttcctcagcttgcttttgttcttctaacttcttttgttcctcagcttgcttttgttcttctaacttcttttgttcctcagcttgtttttgttcttcggcttttttctgttcttctattttcttttgttcctcttcctgtttttgctcatctatcttcttttgtttatcttcttttttagtttcttgttttggttcttctgatgtatttgctttatcatttgaaccacaagcagccaatcccataagtaacacgctgcatgctaaagccattaataattttttgcgcataatttaattcctccaagatatatataatgtaatatttctggacaatcttatcaaaataaacatctgtatattgtcatatcgtgtcgaatgagaataaaaaagatagccataactctcaatggaaaaatgataagaatttaccgatggatattagagcaatatcctctattttttactaatattaaataatagtttttatcaaatctatcgggagatgtggttttaatgtggggtaggggtgtgtatcaaaaggtgtaccttttgggaatgttaaattttatatttttataaacttaataccatattaaggtgatagtagattgtaagagtgataataggtgtagatttaaaataaaattcgattatttataataaagatagataatttgtaataaagattgataaaagaacctgtgttgatatgatcttagggtcatccaaattacgtgacctcattgataaaaataaataggttaatcattcgacacttttattgaaaggagagagaattatgttttttatagcatatttgcctatttttttgtacttattattagaattttatagaagttcacctgttaaagaagaaaaacaaaatagtggttctagtttttttatcggagcagttttagccttgatgataaccattccagagattatgtatttctttacaataaataaggttaattcatttctgttttttggtgttattgttgggctaattggtgtatggattagattttcttcaatgaatacattagggcgattttacagtaggaacgtcggaatgcagggagaacataagttaattcaaagcggtctgtataaatatattcgccatcctggttatttaggttcttttctgacctttttagggtttgctatatcttcatcttcgttcattgccattatcataaatatctttttattttttcttgcgtattcgtatcgtataaaagttgaagagagaacccttgttacactatttggtgaacaatataaacaatatcagtccaagacttggcgaattattccgtttctatactagaaattataggagaaagttcaaaataagttactaaagtcatttttccttattcagctaacgggtgcgttagttccaaaaaataagatgattcccttgtatttttacactcctttaaataatctaaacctatgttatttaacatctattatattagaaaattgcagttttatcttgttataaaaagcatcggtacataaaacagcgctatttggtggatcaatattaacaacagtcatatagctagagagtaaatagccatcttcataatatgtaattagtatttcttcttcagataataaggaacataacaacatgttctcaatcagttctttttcttcagcggttgagattggacggggtaccctatacgtttcttaattattttaattgtactagaaattgtgaataaaaaaagagagccgaagccctctataataactactaataaccatggtcactactctcatggtaatatgaatttgattcaccacaacaaatacatgttgtttgttggataaataatggactaagttcagcgttagctgtagtggcatttgagaaagtaatactttgaacatcctcaaataagaaagtttttctatctcctggtgttaatgtaattgtttgtggggttgtggaattaaatgttctaatagtcaatgtaacaaacgaagcaaatacagggctaaaactaaaacgaattagagttttattgtgattagttgtaaaattttcaaatagggtaattgtagaaccgggtgggatttcaagacttgtgggggtagtttcagatccaaaaattgtaaatgtctctatgaaacagttactggagtttgaagagttacatgatttatcttttttcttgtaatatttctttccatctttacagaaataatctgccatatctaatcattcctctcaaaaaagagtttaaggttgtcccatattatattatgaaggttgtataaaaaggttctagtttaaaaagagtaaaaaaaaagagagccgaagccctcattggataaattggtaatttttttgaaaaacggccttgctgccgtccgtctagcccctcataagctcgttggatgtcgttgcaaaatttgaaacttattgctaatcataaaaaagacacccaaaggtgccttcctccgacttgaaccgctttaattttaataatatgtattggaatctcatcaaaatagtattttactacgttaattaatattgatcattgagaaaaaataaaagcactctttcgagtgcctattttatttagatacagtagctttatctttacggaagatacccattaatcttccgatatcagtaacagtcattattaatgaagttttattaatgaatttaaccagcatttttatgtgaatcagcacatgtgagtggatttgattttggaaagaagaaagggacactctatattcagttagctatggaagaactcatgaatcaattgtcccctgttcaaacaatggagatttcagaggcacacattggacagtatcaaaaattaccagctcgtgttattattcatcgattaacaaaagaacaaacagagaaaaggttgaaggaacaagcaaaaaaagaaaagaagaaaggtattgcctacaaagaacgaagtaaacggttgagtgggatcaacgtgtatattacgagtctttctacagaaaatgttccaacggaacatatccatgacttgtattcattacgctggcaaattggcgtgtccagataaggacacattatctagttggtgaaagtccaatcgggagaatatgcttttaaatttaaggcaacgaaaacaacaaaatttgcagatgttgataaaaattcttggtcttacggtgcaattagtgcattagaggaaaatggggttacaattggtactggaggtaatatgtattctccaaaaatgtttgtaacacgtgaagcgtatagtcagttcttatataactctattaatgcagttgaaaaagaaacaaaaccagagccaaagccagagacaaaaccaggggtaacgccaataggtattcccaatgcgttagtgacagatgattttttctttgatagatattcaattgaaatttcatctgtaagagagcgatctatttctaaacaaggtcaaaatcttgttactgaagtaaataagaagtataatgcgaatttcagatatagatatgtagcatcagaaattgatctatatactcctaatttaccaagaatgattgactctcatggttcattttcgtttgttgggaaggatgaagataacttctatttcatgtttgtcgttgacaaatcaactgttgagctagcgaaaaactggatgcatatgataaatccgaatttcactcttgataaagagattgatagattagtaaatccaaatccagaattaaaaaaagaaattgatagttttgtaaaaaatgataaggattatatcaatcgttttgaaaaagataatcatagcgtagaattaaatgtaagtcctctacagtgggtaaaacctggggagtctgtagttactctacatccagattactatgtattaggaatttctgtacaaggaaagtaatatttaagtagtgtattgattttcgtacagtgaaggatagacaatattagggcttattgattttttgaaaaagacctactgttattgaagtgcaccccaattgttagacacataattaacaattagaggtgcattttttttatatgttttaactgtatagattttttaaacaatagatactatttcatttcttttgctttaaagatggagcactctctttttctcgtcagcgtttgaaccaacaattaaaacatcttaattcctttagcaaggcttgtaaaattccaaaagttcaacaggaatattatttttgtatgctatacatgcttttgtatcaccacgctgaatggtcttttggtcaattaacaaaagcgcagcaaacgtatttgcttctatctctaatttatcaacggaaaagaatgtattcttacgcagaaaaggtgtatttgcatgagtatgtagaaccgcgtgtcctaattcatgggcacaaacagttctctgcatagatggagataaattagtattaataacaatgaaacgatttcttttttcatatttataaaaaccatttatttcttcatgtaaatcccatgttagtacatgtatttttaagtaatctgcaagctcatagggatttttcgtgttgtatttggtgcaaagttgttggactagatctctaatgacgaatttcaatgttttccctcctaagcttgcatcagttatcgtctggattacgatatttcttaggcacgtattttttattgattacttttgtttgttttacaatgtactccatcgcatctaataatgactctaccgcttcttgactcataggttcaccagagaacattaagccatcttcgccttgtagatctttctttatttcttccattctttttgctatatctttctcatcttttggcgttacttgttcgtttggttcgcctgtaacagatcgaccaagtaaatagtcagctgaaactgaaaagcaatcagctaatttagttaaaacatcatgtggagggaacctctcttctgattcgtagtaacctatcattctttgggatacgccgattttttctgccagttgtttttgagttaaattctctttttttcgtaaggattttattctaagtcctatcacatcgttcacctctctaattgaactaattgttctctttgaattcattttagcacaaaaagttcttttatgcattgacaaagaacaattggttctttaatctgtatttagaactaattgttcttatggaggtgtgataatgggaaataaaatgtacgatccgaaaaaaaacttatataaagaaattgctagctattgcggagtaactgaacgctatattcgaatgattgatcaaaaagaaagaacgccatcaatggagacagctaggaagattgcacagttttttgataagagtgtagatgatattttttttagtaataaatcgaactttaagttctttttaaccgcactttggtttaaaaagtgtggaaagtagattttgtcatggagaagttaagagttgcaataagtaagtaaaaaaggtttgaaaatatgagaggtagataatatggggattttccgagtaaaaaaagataataattattccgttattaataataccggtctaaaggataagaggctttcttggaaggcgaaaggaatattagcttacatacttacacttccagatgattgggtgttttatagagaagaattatcgcaacatgcaaaagacggtattaatagcttaagagctggaatgcaggaattaaaagagtacggatatattagaagatttcctgttagagatgaaaaaaacaaaattgttaggtgggagacaattatttacgaaatcccagtggatgattatccaccagtggaaaacccacctgctggaaaacctgttgctggtaacctaccggtggataatcacaagctactaaatactaatatacaaagtacgaaagaactaaatactaatatacaaagtacgaaagaactaaatactaatatacaaaatataaatcatattcatgataataaacaaagtttactctcaaaaaaattaacaaatgaagattttaaaataagtcatcaatttttgatgaagaatagaatttcattaagtgaaatagcaattatagagcttggtgcattttgtgaatcactaggtagtgaactaattggggaagcagtaaatagatcaattgatgaaaatgtaccaaagtggagatatgtacgtgggattcttaaaaattgggaagcaaaaaaggtaaaaacactcaaggatgtagctatgctagatgcacagtttgatcttggtaagaataaaaaacaatttgggtcagggaataccaatcgaaatgaaatggtaccagaatggttacatgaaaaagaagatattccagaagagcagcctataaaaaataatgagttaactattgaagaagagcgtgagagattaaaaactttattaaaaaaatataaatcataattaatatttataaattttattaaattgataataaggttagattatctttggtgataaaaataaaagcagcatttaaataaagaaaagtagggggattattatatgtttgactggctcaaagattatcagaaactagaagaagaaattgcatatttagaatataacttagacaaatcaaaagcagaattaaagcgctggactagtggggacttgcaaaatatacgattaactgctgaatcggaaggggctaaagtagaagatcggattgaagctattgaatatgaattaggacataagatgaatgaagtatttgatttaaagattttaattaataagtttacaggattagatcatcaaatactcaaaatgaagtatattgatggaatgaccttagaacaaatagcgtttgacttgcattatagtacaggctatatccgacgcaaacatgctgaaataagaaagattgtcaagtttgtagatgggttttaatgttacctttttgtaggatacatgcagtgtacagaaagtattgaaaaagtgatttatagtagtaatataagatttcgacgaaagggcaactatttttatggttgctctttttgttgtgaaagaaggtgagcaacatgaagtaattttaaaaaataattttcatttaagtgttagaggtacttagtagattaagagttttatagaaaaaataataggaaaataaggagagatttagtaatgagtatattagctgcttcagttaaaacaaagaatctgccacaacaagtgttacgttggcaatcaatggtagaaagtgaatgttcagcacaaggtgtgtctgaattagttccctatgtacttgggattattatggtggagagtggaggaaactctgaaacaacacctgatattatgcagtccagtgaatcacaaggttgggcgatgaatacaattaaaaatcctaaagattcaatttattatggagtaaagcatctaaaaggagcttttgatgatgcaaagaaaaatggcattacagatttaagtgccattgttcaatcatataattttggacgagcttaccttcgctggttagcttctaacaataaacaacattcattaccggtggcagatcagtattctaaaacggttgttgcgccatcacttggtaatacaactggtgctatggtcaagtatagtcagcctattgctgttgcatataatggtggctatcgatataaaaatggagggaatttcttctactctgaaattgttaaacaatatgtagattttgatgaagctggtaataacaataaaccaatacaaccggtgggcttggggattgctgtaaataaatatccgaataacggtggtattaatctatatagccaaccacaaggtggacattttacgagagtaatttatgataaaacaccgtaccttattatagatgcagcatggtttgaaaatcctatgatttgtctcggaaacgaggcatgggctgctctggaacatttcgatgtgcaatggttcagtgcttattcaaaatatccaccaggtggcggtattaacacgtatgatggtcctaacggaaattatacaggctttgtagacgggtctgttccatatagaattttggcacgaaaagatggttatttggcgattggaaataatgcatgggtaaaagaagaacattttgatgttagataataacggggagcttttcgttcggttaatcttaagatttgaaaagctaaaatacatccaaaaaataataaatatagacagtgaacgaaggtgctcattcaagcaccttttttatattgtgtaaaaatagaaaggaagactaatatggcaaaatttatttatcctacagatacaacaagagtaacaagtggttttagaggaagtagaccagatcatcatggggtagaccttgctgaagcgggctatcatccgatttatgcagcagctagcgggcaggttagccgttcttatctttcatctagttatggtgaatgtattatgattgtgcatactattgatggagttacatgggaaactgtatacgctcatatgcgtagtggttctcgaacagtaaaagtaggcgattatgttacacaaggacaaactattggggttatggggaacacaggggagtctagtggccaacacttacattttgaattgcataaagggcgctgggatgctagtaagagtaatgctgtgaatccactagattatttggggaaaggtgacagtggcaacaatactgataaaccgatacaaccagtaggtcttggaattgctgtaaataaatatccaaataatgggggtgttaatctatatagccaaccacaaggtggacattttacgagagtaatttatgataaaacaccgtaccttattatagatgcagcatggtttgaaaatcctatgatttgtctcggaaacgaggcatgggctgctctggaacatttcgatgtgcaatggttcagtgcttattcaaaatatccaccaggtggcggtattaatacgtatgatggtcctaacggaaattatacaggttttgtagatgggtctgttccgtatagacttttaggacgaaaagatggttacctgggtattggaaataatgcatgggtaaaagaagaacattttaatgtgagatagtattttgaaatctataaatatcaaattaaatggaagaagcagtgtgatacttttttatgaattcgtttaaaacgatggtgtaggagtgtagagaggaattaaaggaagagcaactgataaacagttgctctttttcttttttagcaggtgaagacaaggaatttattagagaaaatgctggccgtatggagattaggttactagatgtactaaataatgcagtgagaattttaagtaataaaaacgagagaataaaaaggagatgttcagtaatggagattagaaaaaaattagtggattcaagtaaatatgctataaaatgtcccaatgcaatgaagccagaattcatcacagtacataatacgtacaatgatgcatcagctgaaaatgaaatttcttatatgattggaaataataatgcagtttcgttccatgttgcagtagatgacaaagaagcagtacaaggtattccgtttgatcgtaatgcttggcatgctggtgatggtaacggaaatggtaatcgtaaatccatcggagtggaaatttgctattctttaagcggtggggatagatattataaggcggaagataatgcagcaattgttatagctcagttaatgaaacaattcaacattccaattagtaatgtacgtacacataaatcgtggagtgggaaacattgtccacaccgtatgcttgacgagggaagattggatcaattcattgagaaggtaaataaagcatttaacaacaataataataaaccaatacagccagtaggtctggggattgctgtaaataaatatccgaataatggagggattaatctatatagccaaccgcaaggaggatattttacgagggtgatttatgataaaacaccgtatcttattatagatgcagcgtggtatgaaaatcctatgatttgtctcggaaacgaggcatgggctgctctggaacatttcgatgtgcaatggttcagtgcttattcaaaatatccaccaggtggcggtattaacacgtatgatggtcctaacggaaattatacaggctttgtagacgggtctgttccatatagaattttggcacgaaaagatggttatttggcgattggaaataatgcatgggtaaaagaagaacattttgatgtgagataaggttaaagaattagagtcactcgtatgagtggctatttaatttttggattggagtatgattggaaatagaaaatgtcagtagtgttctatactaagttgtttttatgtatcgattcaagaataaaaggagtagtttagtgcgtaatttgtttatgttgaattaaataagaagtaggaaagaggtggtaaaatggatagtttacaagaggtgaagggtgatgttcaggaaataaggcaagatattaaggaaatacgattagagattagaagtttagaaatgcggacgacaggtaatgaaaaggacattattaatattaataagcaattagacaaaatcagtgctaatacaacttggatcctacgccttattattggtggactaattggagctgctcttaccttctttttgaaagaccaactatgagaagtcaaggggagttttttatataaatagggggtgttttatacaacgatagaggcattaatatcgctacaataatcgaaaaaaagtcttgataatatggtgaaattcactccgtttgcagcaattcctgaacagtttgctgggatacgtgaaatcatcaaggagaaaaataaagtaactcggccgatcttaacagatgaagaaaaagaactaattgagaacatgttattatgttccttattatctgaagaagaaatactcattacatattatgaggatggttatttgctctctagctatatgactgttgttgatattgatccaccaaatagtgctgttatatgtaccgatgctttttataacgagatgaaactgcaattttataatataatagatgcaaaatagaatatatttacttaagcacatttagaccattataaaggagtgtaaataatgcaagaggctcaaataagaaaaagtgcagcaggagcaattattcataacgatataaatgactatccctatttaaatataccgatgattattaatgaaaaagatggaatgatttatgaagttctaggtgctggttttcacactaatgatgctgtagcaataataacaacggatgattttgctacaaccagggtaactgcgcctcttataacagtaaaaaacaatgatggtagtattcaattatatcgcttacctttagaactagaacattgggtactttcttgtatgcgtgctgcttcagtaggaaaaaatccgtttccctgtaaagttgctttcggaatcatcgatactaaattttatgtagaatttatataaaaaaggtctgcttattcagcagacctaccatcaattatagctttatatttttttccttttcaatgtccaaataggtgtagaagcaaggatctggattggctcaggtaataacggtcttactttcttcccatctcgttgtcgagaaaactttgtgcttaaacgtgctttatcccaacctagtatctcagcaaattcttttaaaccaacgagaaggggaattactcccccagttcatcgctccacacttgataaaagccgccaccaaccgtttcaagtacattatcatcctcttgtggggatattccataccaatatgaggttgttatgacttcgccatctaaagtttcaattgtgattttttcttgcgtgtaagctataccttcttcagcaacttttttcgcttcacttaaatcatttacttcaacttcttctgttacaccagtatgatagtttacaatgtatttttccatttataatatccccttcaaaagtgataactttgttaacactttttaggataattcatttaattatttccttccttttaggaaagagaaaatccatagcttctacagttaaaatccattctccacgttgttttccttcaggcttgtagtatttaacttttccactctcaatcaatgcatctattaatttattatcttttcctcgcttcaatttcattagcagcgcttcttgtataatcccccaacgatcacacgcctctcttggtggcataatttcatctagcataaataacatccccatcacctctcgttacctataagtaacgttcaaccggataaaaaaacatgatgaattctacatgcgtgtgattggaaccataactttgcccaaacggcaaggttatggttctttttgtttgtggcaaagttatggttccaaaaataaaatgtacaatcaacttaataacaagttgccccaaaaacgataaaaatgaactccattgttataaaggaatctaattttttgttttgggggtagtatagaatattaacttgattgtgatgtggcgctaagcttataagggatcactatatttaaaaaaattgtacgtttagacacggtttggcaaaaaactaactgttttcttgtacattaataaaaactacagtaaaagttgtagtttttatgttttcattttcctttttgcattcatcttttacttagatgaatgctttttttagtacataataaaaaaaaacggaaaaagtgtcacaaaatccgtttttctggtttctatataatacaggcatcaaattgagagtgaggttttaactaacatgttaacaatagaaaatgaagaaagtcatgcttctgacatgacttttgaagatttatttaagcagtactatgcttacgctgtgaaacaaatcatatggattgttaaagatcaatctatcgctgaagagttagcgcaagaagtatttttacaattatatcgtagcgattggaaagcaatcgaaaacatacctggatggctgattaaatcttctacttatgtagcgtataaccatttgcgatctgaaaaaaggcatcaagcgaagattgataaggaaatacaataccatgacgtacaaaatgtctcatcattagacgatgattggataagaaaagaagaaattacaaaagtccaaacgatactaaataaaatgaatgagcgagaacgaacccttttactaatgaaattctctggttttcaatataaagaagttgcagaaatacttcaaattgaaatatcttctattggaactttattagtccgagccaaaatgaaatttcgcaagatttataaacaaatggaggaggcataacaaatgaaatgttatgatatcggatttattcaaacatatattgatggagaactttctcatgatacaagaaaagaatttacaaagcacctagatacatgtgaagcatgccaagatttattagtagaaatcagtaaattaaaccaatgggagaatgtaatgctatatgaagaatctgcacattcaccacaagaaatcaaaattgacgtagaacaagcatggaaaacatttgaaagtcgttcaaaactagacaatgtttctaatataaatcataaaaaacaacaaaagaagggaatttttacaaacatgaataaaaaaacaaaacgtttcatttatacagcagtagctgcagcaggactatttacaacagcaatgattccacaagtacaagtggcggctacaaatgttgcctcgtatttttctgatgcaattacaaatgataaggttgtaaatgaaggaatacaagacgaaaatggtgtcacacaagatacgatgaagaatggcaaatatattcctattgatgaaaaaattacagatcagggtattacagtacatttcaaagaattatatatcgcggattcacgtatatcagttcattatagaatggaaaaagcagatggaagtttagtaccatatgaatttgatacagctggagtagatcttaagagtgatggtaaggtcaatggacaacaagaggaacgacctgaacttaaaaatggatcattaatatcctttatacaagataaagatgattatcttcctttcgaacttatggcaacaggtaaaaaattagaaacaggcattcgtgataaagataaaccagaaggcgttgttacatttgttgtaaatcctgaagaaaaagacgcttttaaacaaccccttacattagatgtaaatataaataaaattggaaaagtagctggatcttggaaaggtaagattcaaattgatacttcacatttaaagaataaaaccaattaacatgaaaaaaagaatagcacaatatgtatctaatgctcggtttatatgttttcttgtttttgttacatttatttcttatatagttttcactctatcttttatttatgatttaagtttataaacttaaattaatcatttaaaacattataagataaaaacttcataaaaaagctgtaaaatcaatagccggttccttaatgtataaggaaccggttagtttgtgtctaaacgtacaatttttttgatatggtgacccctactaggggtagcgtcaggaaaatgcggatttacaacgttaaggaaattcccttattaaaaagcctaatttctcaacatttatattgagaaattaggcttttttcgttgctccgttaaagcgccctattttggaagatcaagataataattactgccaatagataattgaactaatgctcccgattatggagcaaatcactatcaaatccttcctttttgttcattatatatactccaaataaaatgatgatcatggcactccaatcacttatcaaaatgatttcgtttgctaatagtgcgccgattaataaggatattacaggtggtatataagttactgtggaggctattattgcccctaaattattgacgagaacataataaagaatgtaagctagccctgttcctagaactcctagtcccactaatacaccaatcaacgcaactgagtctgattgaatattctctatactttgtaaatccccaaagagaccaagtataatgattgcaatggccacctggtaactcgttaaagctgcgggagaaatattgatttttgttaaatatttttttgcatatacaaaagaggcaccaacactgagagaccctattaacatatatatgacacctttaacgtcaagagctgtatctccgtttttccatggtctcgcaataagtaacacaccaattaatcctacaataactccgactactcttttaacagttaccttttcttcttttaaaacaaagaaggtcatgattgtagaaaaaatcggtatggacccacttaaagccccagctattccagaattcaacaatgctgtgcctttcgcaaaacaataatagtaaatgatagttgcgaggatagacataattagaaagtggtgtatatattttatatgacttaactttatttgacgtttaataagtgcataaagaaatacaggaataaaaccggctaaaactcttagaaacacaatttgtaaaggatcaatatgaacggcggcccatttcataaaaagaaaattagtgccccaaataaccccgagtgttagataagctatataataaacgttgaatttcatttgtgtctttagcactttttactcccctttcacacttcccttttttcttctttttttgtataagaggaagacgataagaagtttaatgtttcatgtaattgatcagctgcataaaaagcttcctggtctttggatatatctccaggtttatttcctttcccaataatatatccttcaaaaggtagaccaacaaagtcaaagatgtagttgaattgctgaattaatggtaatccttttataaaaggagaatctcccccaactgcaactacataggcctttttcttagacatgatttttcgaaagtctttatattgaggatctctcatcgtttgggaccatcgatcaataaagttcttcattgttcctgtcatactgtaccaataaatcggtgtcgaaaatatgagaatatcgtggtgcaccattcgatatattagggagttataatcatcaccaacatcttgaaagccgtcttcagtgtggcgcatatcatctattggtttaatattgtaatcccttaagtaaatggaatctacttcgagatccttaatagaacgtttagttaacgtctctgtatttccatttgggcgagtacctccgtaaataactgcaatactcataattattccactccttttttttgactgtttatgatttatagcttaaactacacatataaatcagtaaaacagattattccgtttggttcaatcgatatttccgatttaggagggagacgaatatggatattaaacaactcatcacttttaagacggctaccgaaactcttaatttcaccaaaacagctagtatattaaactttgctcaatctagtgtgacagcccaaattaaagcattagaagaagagctagaaaaacctttatttgaacgcttaggtaaacgcctaacattaaccgaggcaggaaaagaatttaaaatctatgcggaaaaaatcattaaactaaatgaagaagcaaaaatggccatcagtggaaataaagaaccttctggcacccttatcatcggagcacaagaaagtcaatgtacttataggttacctaccatattaaaagaatttaaagatcgataccctaatgtaaagttaatatttaaaccagctcattccgacgagttagctagaaagcaactaatgaatggtatgcttgatattgccttcattatggatataacgaaacctgaagaagctttaacgataaaacctttgatacaagaagatatcaagatggtggctgctccaaaccatccattagcttcgaagtcagaggtttatcttaaagatattgagcatgaaacactgctattaaccgaaagtggttgctcctaccgtactcttttagaaaagtcttgtcactcagcaaaagtctacccagtaaataagtttgaatttggtagtatcgaagccataaagcaatgtgtgattgcaggattaggaattgctgcattacctacaatggttgttgaaaaagatattaaaatggggagaatggtggaattaaaatgggataataatattcctcctattttcacccatatcgcttggcataaggataaatggatgactcctccattggaagattttattgaattaactcaaagaactttcaacagacacaagatttaaacataaaaaatcgctaagagtttgttaaacctagcaattttttcatgttaaccagaataatcacttactggaaaaaagaagcatcaaaaataataaaactctaaggctatcccttgccttagagttttattctatcttattcaattatcgggtgcttagtttaaatacactttttacaaactctatctaattttatcataaacttccttaatcattccttactccattatatggcccttaatggaataaggaacgattattgtttctcttccgacagctttctatatatggggaaattaggtcttagctacagccttacgcgaaatgggaagaatagaaaaaacgatctttattcttaattacatatcggatgaaactttaagaagaaaaatacaaagaggattgaataaaggagaagcgatgaatggactggcaagagctattttcttcggaaaacaaggagagcttagggaacgaaccatacagcatcaattgcaaagagccagtgctttaaacataattatcaatgctatcagtatctggaataccctacatctaacaaaagcagttgaatatcaaaaagagacaggtagttttaatgaagacttattgcaccatatgtcacctttaggctgggaacatattaatttactaggagaatatcattttaattcggagaaagtgatctcattagattctttaagaccactacaactttcttaacgttgttaaaaatgggggaatcgtcttggaaaagagcttagcgttgtaaatccgcattttcctgatactaccccatgcccatcaacttaagaatttgcactacccccaagtgtcaaaaaacgttattcgtgaaggcgataacattattacgatagaaaaaattaataatggtcttccttatattactaatattgatgcttttcaacgatggaatgaaaaaggtaaacataaatttggtttttatagtccagaaactgacaatgaaaacatgtctcctgaccgtttgaaaactttaatggaaatagaaatgaagaaacgtgtaaatgcgtctgtttcttatgaggtaaaagcggcatccataggacgtgtatttggattagcgcatgaattgattaatgagggtgacacaatccgaattaaagatacaggttttacaccaaaactttatttagaagcaagagcaatagctggagacgaatcttttactgatcctacacaagatcaatatgtatttggagattatcgagaaattgtagatcctaacgaagaattacgaaagatttacaatcaaattcttagttcgttaggtagtaaacaagaaatgctagatcagctagacaaactggtgaaagagaatgaaaaaacaattgaaaccatacgaaaagaatctcaagcagctaaagagttagcagaaaaagttcaagaaaatctaaaaaataatacggtaaatattattgaagctaaaaacccaccaattgataatcttatagtaggtaaaacattatggcgagatattagtaacggtaaacctggtatgttaaaagtgtggaatggtaaagggtgggagcttcttattcctgatgtggaatcaattaaaaaagatacactggagcaggttaataaggatattaaacttacaaaagaagaattaaataagaaagtggaagaagcgcaagaagaagccactgggcaatttaatcaagtaacagaaagccttcaaaaagttacgagaactatttctgatgtacaaagagatcaaggtgaaattgataaaaaagtaaccaagtttgaacaggattctgagggatttaaaacttctattgaaacattaacgaaaaatagtactgatactacaagtaaaatcaacaccttagtaaatgatgtggacggaaataagagagttatttctgaagttaaagaaagtgtagcaaacattaatgacgatgtaagaaacttgttaatcggttccaaatcttttgatggtgctttgacctctgcgcaagcggacaatcgttggtggcttaagtcagcagataaagtcaaaatttcgaaggatgtttttcaagggaatacagtcgtagaaactcaatcatcatggaccgctttagcttataacttcaaagatttagtagatcgaaaagttgtaaaagtaggagataaagtaacctattcaatttttactcgtgtaaaaggtttaccgaacggccaagacttacaacacactttctattttgcagcaggggctaccggcatccgtccaaataaatctactaatcaatggcaaagtgtaagtgtttcgttcgtagtgacagcgggcatgatggcatcaacaggaacggataacgagagtcattttcgtgtagaacctgacgtgaatcctcctgctggttgttggtatcagcaaagttcaccacaattgactataggtagcaaaggatattcttggcggccagctcctgaagatcttgcagatgggaatgttttaaccaaggtaacaacagagatcaaagaagcagcagggaagattagtgaaaagttaacaagagtagaaacaaaggttaataatgataaatctggaggacgtaatctgttattagattcaaatgctaaatacgaaaaaacagattatctaatcaatccatattctctaactgaaaattttgttgcaggtgaggaatatacttttgtaattaaaggaagtgtcccgcagggtcaacaatttggaatttggcagaatggtggttcaaataatgttggatatgcaacaagtgtctatgctaacggaataacttatgtaactttcaaagctgttgcaactacaagtgggaatgaacggagattaaacttatataattatccaaataatgctacaaaggcaactgtagaatgggtggctttatataaagggaataagccacaggattggacaccagctccagaaaatcaagtaacgaatgatgaattcactaagaaaacaacagagattgaaaaaagtgtggatggtattaaagaaagtattaaaacggtagaaaaaacacaaaccttttttgatgaacgtgttaacactgtagaaaagaatgcagaaggaacaactgcaagtgttaagaaattacaggaaacacaaactgcgcaaggaaagacgattagtgaggctactacaacaataggtcaacattctgacgcattaaagttaacaatgaaaaagaaagatgttgaggattatgttggtggattgggttctataaatgatctacggaacgctgcattcgctcagggcttcaaatactggacacaaaatggtaatagtgctgttattgactcttctgtaacatacagaggctatacaacggctaaattacatgcgactggattgactgaagataaatggtatagccttcatcaaacgatagacgtaactgctggtgaagacattgtagcttcgggttactttatgtccaataacataggacaaggtttcgtgttagaaattgagtatctaaatgcccaaggtagccgagtttcacaatcatcaatcggtatcaatgtaactgcgaattctaattggattagatctgttattgccggaacagttccagttggggctgttaaagcgcgttataaaccttggttgagaaggaatggaacgttatggattgcgttacctatgttgcagcgtggtaaaatagctacagaattttggctacatcccaaagatcaaacggatattgataaaatgatagatgatattgctaataaagtagctactgagaaatacaatcagaaagttacagagttagaaagaagtattagtgctactgaaaaaggcgtttcaattatctctggaaaacaagaaacgtttataaatgagacttataatgcctatgtaaagaaaacagaatctaagttagaagtgttagatgaggggattttagcgcagattttaaaagacggtatcattacttctattaatatgtcacctggtaagattacaatcgatgcggagaaactgaatattaatgccgatacaatggtgaaatggttaactgcaaaaggcattgatacgaatcttattagaattgatggtgataagataaccattgataaagatggtgtaactgttaaaatgctagacttcctattccaagacgaatggggcacaaaaacaactgcagtatcaagacgaaacctaatagcagatcccgacttttctagtgttacaaagaaaaacattggacataacgattattatggatttgaaggtggatatggccttacttggaagtcctggggaaatgtcgtaatagaaaagaatacacatatattcgattacgagcagatggtgaatgctgcaagggtagatatgtataactatccggaagcgatcgtgaataacggtatacatcctggtaacgaatatacagcatccgctcattttagaactgccatgataaatggcgtgcgtaagacaggaaaaccgagaatacacgtatgctgcgttaaattcggagataacgtaagttacgacatattgagtgaacaaaagatggacttccctgagccatctacctattatggagaaatcagaaggtattcttttactttcaaagtgccaacaaactatattccgcaacaacacgcattgattattaaagtttgttctggaaatgctgacatgagacaagggacagcgatttgtgtaagtggtgtaacactgtacagtgggaaatatgcatctatgtataattgggatcgtgctgcagcagaaagagcagatggcattcagccgtttaacggactcgctgtaggcggtgtaaataacaatatatctccagcaccagacggacagacgtttgatataagtactgaaaaagaagttaaaatctttaggaatatacgagcaatgcagggaattaacttaggtggcggtggattccaacaatggggtcatattcgttttacagacggtaatatgggagcgggtttttatgcgagtactccaagcggttggaaatttaatgcacttggatagaaaggagcgataagaatgaatgagaatcaaatgatgccacttcaagcaggtgaaagctttccttttatggggaggttggtggatgcagagcgcacagatacagggatttttgttcaaatacctgccgatatgttaaataatgcaggtcttctaaacggtgttagcagggttgaagtatggagagaaatggatgggacagtaaagtttcggattgctacgctgtgtgaaatatgtaaacgcggagcgcgtttgtactcactagatatgggatttgcgaaaaagaacatttgtttagagtgttatgcatcacttacagggaattacccatctcaagaaccgccaacaccaactaatgaaaataacacacaaacagagcaggagcagcaatagctggtctttttttattgctaaaaaaggagatgaaaagatggatcgtattgatgtattattaaaaacctttattgccactttcggtggcttttgcgggtatttcttgggaggatgggatacaacattgaaaatcttagtgacgatggcagttattgattatttaactggcatgattgcagcaggatataacggagaattaaaaagtaaagtgggtttcaaaggcatcgccaaaaaggtggtgctttttcttttggtaggagcggcagctcaattagattcggcactaggaagcaatagcgctattcgtgaagcgacgatctttttctttattggaaatgagttgctttcacttttagaaaatgcagggcgtatgggaatacctttgccttcagctttaacaaatgcagtcgaaattttaggtggtaaacaaaaacaagaagagaaaaagggagatgttcaataatggaaattagaaaaaaactagttgacccaagtaaatatggtataaagtgtccttacacaatgaatccggaattcattacagtccacaatacttacaacgatgctacagcagaaaatgaagtatcgtatatgattcgtaatggcaaccaagtgtcgtttcatattgcggtagatgataaagaagcagtacaaggaatccctttagagcgtaacgcctggcatactggcgacggtaacgggaatggtaatcgtaaatctattggggttgaaatttgctactctttaagtggtggagatagatattataaagcggaagacaatgcagccatcgttgtagctcaactaatgaaacagtacgatattccaattcataaagttcgtacacaccaatcatggagtgggaagtactgtcctcatcgtatgttggcagaaggacgttgggatagctttatcgagagagtccaaaatgcatacaatggagatggtaaagtaactcctacgcttattccaccgtcaactaacgggacaggtattgcgtatattgaggggaatggcataaaccttcgtaaaggtccaggtactggatacggggttattcgtcaattaggtaaaggtgagtcctacgaagtatggggacaatccaatggatggctaaaccttggtggcgatcagtggatttataatgattcatcatacattcattatactggagaaagcacaccgacaagttcgcaatcagtcaataatggtgtaggaatagttactattacagcggatgtattgcgtgttcgtagaggtccaggaactaattatggcattgtaaaaaatgtgtaccaaggagaacagtatcagtcgtggggatatagagatggttggtataatgtgggtggagaccaatgggtttcaggtgaatatgtgaagtttgaagactaaagtaagagccgtcataatgacggcttttttatttctacgtaattaaaatttacttttagataatgcttttaagatcggatttataattctacttattaaacgaaaccccttaaaaatagagctaacaactttcataaaattagaatctctttttattttaaacacctactttcgcaattctgcttgtagaataaagttttcttttatactacctttatatgtataccttattttattcttttgataaacctttgtatgatctttgctaaatactgtttcgtcactaagaccaagttcttgtttaactaaattacgttctccaaaactcagtgaatcatccatcgttcctattaataataagaaagcgaatttaaagtcttccatctcagtaaaataagcatttggagtcattgctaatgaagctttttttatatttttattattatcagtttctaaaacaataataatattgtctgataaaccaatagacgttctcccgtcttttaaaatttcagttgagttaatttttagctttgttttttctcccatctcttttaatgctttttctactctttttgtgtagtcatctactgttaatttagcctctttattttctgcaaccgcaggtttagtgccatcctttttattaccactaacaccagcagcaacaaaaattattattagtgcagcaataatccaaacccaccattttttataaaacggttttttcatatagtttccctccatagatttatacctaaatcataccaatttcatacaacaactgtaaatgttagtttgtaatttattgacgaaaaagaacgttcgttctataatttatgcaaacgaatgttcttttggaggtcatcttatgaatcatttacttaaatgctcgttcaatcaaaaactaccaattgaattaatttatttaaacggttcaggagatttctctcaaagaactgtgattgttagaaagatatatgaagatcgtgtattagtgtattgcatgcaaaaaaaacaagttagaatgctgaaattagctaatatactttctgttgataaagttagaaataactatcaatatgcttaaaaataaataatgaggtgagatcatatgtcaacagcaattccaaaaccaccaaagaaaaaggctactaaaaaagaacctagaccatacatggatgaattcgaacaacaagaggctgctgaattaattcaattggcagtgcaagatgatacagaattagtatttactgtgtatcgaaaatataaagaaccagatgttatccaaggtaaaataattaaactggaacaacaactgaatagaattgtagtgagtgatggaccaaatgcaatacataaaattcaattcatggatattttgaaaatcgaaacgcctagttaatttagctaggtgtttttgaaatatctatgaattaaatatgcgagcaaagttttttcgttttcagttcgtcatagaggtactatataaactccctaatttcggaatacagaattacagagaaaacggaaaacaaaaatttcaaaaatcgaaaaatcaagatttcaaatttaaaaatttttaaataaaatcccacaccaaaaatccaaaatcaaccccaaaaatgtagaatttctattttcaaaaaacatcaaaaaacgtgcggtattttatcgatatagatatatctaaaaaaattcatgcgcacactataggtttttaactcgtacagtagtaaaacgaaatcatcagaacaaaatatatctcgaaataaactttaaaaataaattcacaaattcacaaatttaaatttaagaaaaaactcttttttgttaattctctgttagatcataaaaaccttttgaatgctacttgctgcactcagaaggttttctttcaatacaaaaaagagagaaccaaacttaatattaagactggttctctctttgtcattcaaatatcatcaaccgcaccacatttttcacatttaacctagcacttatatgagtaatatacatcttcaccatctttgaccttactttttgaaatccgataaattttcatttcttcgttataacattcccaacaggtatgtttaacaatatcaccttttttatacaaaactattcaacctccatttcatcaatcaaatgaccgttatattcttgtttctcactttccgttaactcttgatattcttgttcaaatttcattaaatccttattccacattgcaattaatctataataatactcatttttatctgtactcttatacttgtccaattcgccatcttcgtattttttagcataatcttttagcaatccaccgtacacaattaattgtcgaccttttaaagctaaataaaacacgtcgaacacatcttgactcactgacatttcataatcttttgctgaatacttcgcaacctctgcaactgcatttccttctcgaattaactctactttttgaatatgtacttgcgtaatctctggcatatctgttacttctcgccacatttctaaccattcttcttgcttaatataaagctctttacgtttaaaataatttttatcaacacaaagcaatacatgaaaatgaggattatatgtatcataattcgggttatgatcgtctactttcaatccacgagaatcataatatgcttttctctttttgttgttatacatttcttcagtgatgaatcgttctttatcatacgtcatttctagctttctaatataacccttaatagaacgttgaatattacgtctcttaaataatttattaaaagctttattaaatctatcaatctcgctttttaccgtatcagctttaatattcggagttgtcaatgttaagaaaagaaactctttcttttcttcaatcttgattgcttccatcattgttgcgattttcaccgcgtccttccctgctttcctccaagcacaaatcggacaaaatcgatttttacaatcattcccctttactcgtttcttcttctttttatcctttgtagccaaaaattcattaaagatactgcacgatttaaacaattctttcccgctctcactcattttcttctttataaattcgtaaatcttgatattctgtttctttttaggttgtaatttaccagtgatttcatcttgatttttctttgtcatgtttgatatattagtcctatatgaattgcttaaaaaagggtacacgaatccctttttcggacttgctccttccttggtagttattgtttttaattcgacactaaaaatgataaatctacccgccggaaatagcaagtcttttttttcgaaatcccttgtgtatcaagggataaaagaatacataggcatcaatttccgtgcggaaatagttacctatgtattaaagaaagaagaaaaccgtatttttcgtgtccgaaaaaccataaaaaaatgcccttcaatccacttcgtggacaagggcattttttcttttaaaaacaaaaattattcctatctctcagcctcttcattttcacttctaagcgtttttcaaacaacttataatattttctctttaagaattacacatcaatcccctatacctcaaaaacatatatttcagaacacgttcgaagtgttgccatgaaaaaatcgagaaattctcgaactttacctgctaattagaataacaggtaactccctttacactttctttgtctaaataaaacaaattcaagcaaggctctacaatcttccctatcttttgcaatgaaatataaatttgtttacatatttctaaaaatgagtataattgtattgacggttaatacgttataactgttataacattctaactaaacgtcataataatacagaaagactaaacacaacaaacaaaagagaaaactaagaagaccgaaaaaaccaaaagcaaacaaacaaaacaaacataaaatcacactatataattcgaaaaactcaatacaaacacaaagtggcaattagactacgacaaaaaatagtgtggcaaattccaaggaggaagtccaaatgacagcaaacactcgccacatggaaacacaaaaaatcgaacgtaaagttactaaaatcggcaattctttaggtttaacattaccgcaagaattttacactactctaaatatcaaacaaggtgacgttgtaagtttagaaattaacgaagaaaacgaacaaatcgttataaaaaaatccaaaaaaatttctatgccagaggatctcaatcctaagttcttggaatcgttaaacagaaccatcaataaatttgacggtgcatttaaagatttggtaaacagataattatccttcaggcgtggaggaaagtaggaaaaccgaaatgacaatttatataacagaaactcaagctatttttatcaatgaaacacttatcgacatgtattcacctaatgaacaaagaggtgttaaagatacagggttattacaatcagcaatataccgtccacaacaaacagtagcacaagaggatgcatatccgactatcttccacaaagccactgcattatttgaatcattggctaaaaaccacgcattctataatgcaaacaaaagaacggcattagcttgcctagaaatgtttctgttatacaatgagtacgaattaaaaatgtccgaacaagaatcttcagatttcactgttaatgtagtagaacagagattatcttttgaagaaatcttaaaaattataaaagaaaactcatcaaaattacctttaaattagaaaaagacgtgggatttaaccacgtcttttttattaaacaaactatcttcaaggatgttatacaaggctctacaatcctcgctatattatgcaaaacaagttccgctaacgctacacatctaaagaaaaaagagactcacacagagcctcctaacatgccattattctttatcttccaaagatactaatacaacattttcattcatatcacgcaaacgttcacttatagctctcagacctccactaagtcccataatttgatcattcatttccttgataagttctccaattccagctaattgttcatccttacgatcataatcatcaattttcatcgtcaattccaaaatcctacatgtctcttcaatcgttaaattatttttcttagccaattcctttacagtacctataaacttaactccataactatgaaaatattccatccttggttgttgattaaataatgttcccacactatctctccaatccctggtcccaatttttctgttggcttcttcgtacttgttttaatctcttttgttgttcttcatgctcttgtttgtgattcaagaacttttgagcaccctttacttcatcatcaccagcaaaatgtcgttttaaaaacttgcgattcatcttgtccagtatactccccttaacataaccaatcacccctgcgagttcaggaagcttctccttatacatctctttcactcgctccaacgttttcttaagaaaatcatttgcttccttcaaccctcgattctctcttttcaagtctgttacttgcctttctaaaaaacgttgccccttatataaatcatctttttcacgttcaatcttaatcttttcatttttaaggcgtctattttcgtttctaagagactcagaagacttagctaatgattttatactatcgaagtcttctgaagcaatctcgaccattttagagcgtatgaacccgcctttttctttgactggaatctcatctacacttttcgcttgatctaaagacgatgctaaatcataaagacgactatctatttctttcttttcctgctctaacttctctatttcttgttgcaaactcaccgctttaaaccgctgcgtcgataaatgtttcctgtcgctagaaacaccacgctctatatcaaatcccttttccttcacatgttcatagattttatcttgtagatcatgaagctctgatttgtttttaaaaaatgaatacgctgatagtttttgtttttcattaaccggaaccatgcccacatgcatatgaggtgttttttcatcaacatgtactgaagcatatacaaagttctcttctccatatctcgcctttaaaaaacaaacagactcttcaaagaatcgtctctgttccgcttgagataaagaattcatataatcaggactagccgaaatcataaacgaacaacaaacaacagcatctttccgaatcgcacgattagatacaacaccattatcaattcgattttgaatgaatttcttataatccacttttcttttatcatgaataagatcataattctgttccgttcgttcttgaataatgtctgaatttgaatgactttctttttcacgctgattatgtatttgtaatcctttcacatctgtcatcttgaatttttgcatatgacaaaccatgaattttgacatgggcatcgctccttcttcggtcgtagttccatgtaaactgtagcacactacagtttactgcgtaaacacgtgtgccctacgggacatttcggcgaccgccgagccatgacaggcatggcaaaagaattatgggctttgcccaaacccacaagggaaactcttccccttgacccctttcaatcgaactccccaacccctcaatccttgagggactccctcgccggtaggcatccccaaaacatggttttgggaagaacaagagggtcttggtcgaagttacctatcaactccttaatgctccatcatttcgctatcgcttcattccgtccgcttaccgttgacaggtaccataaatactcctcccccttttaaaatctgacatccatatattaaaaagtctctttttatattcaccgccccaccgatctatgggaattttcttgtagtgaaataactacttcctctacaaacatatttttttgttttacaggaagagcttcagctttttctattctttcaaacaccccaaaaacattaatacaatcacattttctattagaatcactataagaatagccatagggtaaaactacagatattcgtatattcattcctagacccattcaaataaaaaagagcataaggaaaccgaatcccactttgtacaaaaagtggtgaaatagactgtgcctattgggtttctcatgctctacttcagggaagcgattttccctaaagtatgcgtcctctatacgtttaaaaacgtttagtatgtattctgcatgtgctttgcatacaccatgacaaataaaaaaagagccccacaaataggaactcttttttcattactcatcaattccaccatttcattttactgcattacgataatcacacataaagttaaacaaaatcacgaaatatctgcctacctctcatcttccaagatgttgacgcacctagcaagcctataatttcatttaccatattcatgtgataacaaacagaaaaagaaagaaaaagacagtcataaaagtttgccgaaatttaaaataagcatataaccctaccaaaaaccatatgcgaatataacctgttttccactagcaaatattaataccgatttcatcatacacaagctatctaaagatagaatagcccctaaattattttgtctcactatcgtctggaatatattcaattaaatccgatagtttaacatttaacttttcacagatcggtagcaatgtatctattcgtaaagatgacacattgtcgttacgccacaacttattgatagagttacgacttacccctgtcatcctaaccaactctgcaacattatctatattctttaccgccataatcacacggaagttatttactactttcattttttatactcctttttctcatgaaatatacatgcttttttcttataagggcacttttgtgcaaagaatagttgttttttaaccttttaaacacaactttagcactttataaaacatttttaaacctgtatggaataaaaaatcatattatgcactatttcatacttcatttaaattaaagttaatttatatacatataaggttatttattttatttatttaaactaatttaaaacctatttaaattaaaacgttcaaaatatgcattatttcatactttatttgttgaaaaattaacctgataaagttaatattaatcaaagtaatatagatttttaatgattggaggtcatttctttggcatatataatatcaaaaaaagtaaaaggaaacatttacttttatgtagcccaatacgttggaacacaaccatattactcaaagcaatacaaatataaatgcatttacgcaatcggcaatcaaaaaatagctttagaaagaatcgcaatgtggctattagataacaaccgtataccaaaagaactactagaaatcggagtatccataaacgatgtgaaatattggtatgaaaaagttgaaaaaacattacagaactactctttaactaaccataaaaacacctgaaaggagcattactatggcatttctaacaaattacaaagcaaacggaaaaagatacttttatgtagaaaaatatgttgctaaaacggaggaggctcctacattgaaacgtgggacaaatacaaagattactacagagaatactacagagattactacaaataaaaagacttcttgtcacaagtttgaaacttgcgacatggagcatgccaaattgttattccagttaattttagaaaccaatccagaacataaagagccgaacttcgagaagtgggccaatgaattccgcttaattcgcgaaagagacaagaaaacaaatcaacaaattgtgtatctcttggaatggtctcaggatcattccttctggaaaaaaaatatattgtcacctagtaagttgagaaagcaatgggacaggttagtaattgaagccaaagaagaacacgaggtgaagaaaaatgagcagattcgcaagcatagcggaagtcatggcagatttgcaaaagagggctatgaaaaattgccagaaccaacaaaaaagtggagagaacttacagacaaggaacgagaggaatcacaacaagaatatgaaaataacattgaatggctcggagaagacgcttaatgatacctgtccgttatgcagtggaacgggaatgatcttaaatggatggacaggtagaatgtgtgattgccaaaagaaacaatctgaaatagcaaggttgaaaaatgcaatgataccagaagaatttgaagaagcacgttttaaaaattatattcgtcataccgatatgcaaaagaaaatgtttaacagcatgatggaatacttaaaaaagtttaatgaaatcagggatacgaagcgcaatagctttggatatatcgctacatatggcgagggaaggttaaaagccttatccatcaatgaacgggttgagaaaatgaaacttcacaacaattacggattaggtaaaacgcatctacaaatagcagctgctaggtggattatacaaaatgttcaaactgtaaataaagacattgtaaatgcacaaccgagagggtgcagagtagtttgtataagtgatgtcacttttatgacagagattatgtcagcaaagcgtgatgataaaaaggagtactttgaaaagctccatacagtcgtagagtatgcggatgtgctggtttgggatgatctaggtaagagcaaacatacagaatctcgtgaagaaatgtactacgaaatcattaatgagcgatataagcgtaaagcgcccatcatttttagctcaaatgaagatgaatataccttacctgaaaaaattgggtttgcagctgctgatagattgctagggatggcaaatcactatttgattgaagtcgagggagaaagttatagacggtaaaggggagaaatcaatcattttgtgggaatggagttgagtgtatggaacaattaacctttgaagatatcgtaggaaacatggattatacagcgcatagtacggctgagaaattcctctctaatcattcagtaacacctacctatgcagtagaattttttgaccgagatgaaaaacagaagttacgttggtttgaagtgaatacagaggctgaagcaaaagaaaaagcggtagaaacatacgggagaattcaaatcattaaagtatatgtgtccaatcgaacattgaaagaaattatggagctggactaagggcatttttatcaagagagcacatgcatttcctaaaatggacaagccaatgcaaaggagaacaggcatagatgaaaagagaaatagacatgaaaacaaacggcatttacattgtggtggatggaaaaatcaactttgaagaacccccaaagagcggctacggacagcaagtcttatattgggtaaagggaaaagtgtctcatacacaaacaacgattacgaagaagtttaaataaaacgaggtgggaaaataatgaatatacaagaagctactaagttagcgatggaacaaaataaatttatttcacgattacactttatgaagacctttaaggtcaagattaagccaacaaatacgtatgagttgtgtggaaattatccaatttatcctaacgaatttaaaccgcgcagggcgtggaatccctgcgcagatgatttaattgctgatgattggataattgttgattaaggtaaccatgatcttgcttcttttgcaaatttgtatccggttttaagagaattattctcttcacaatatgcaatcccttgtggaagtaagacagtgttataggcaacattgtctgctgcatacacagagactaaatcttcatctcgcaaacgatagagtgctttcgaaataaaatcatcagtctcattttggtacaactctttaaatgtttcaaaagagaacatatctgtcccatggtttttatactcagttaccatgtattttagtagtttttctgaaagcttagttattttcattaattacacctcccctctatggggaattatatcaagaaaattacaataaatgagaattttatggggaatttagtcgggaagcaagtcaagcacgtgtagatgtaaagtaagacaaaatttgaattttattaaaaaatggaggaatgaaccatgaatacagtaattattcaattcggtcaaggtacagaagcatggaaggatatgcgagagattacgaaatttctacaagagaaaggctatttcattgaaccttatgaagaaattggatctgtaaaactaactaagaaaatcagtgacgaattagtggataagaaaagaaaattcaattgtgatctttgctttcaaaataaggatattgaagagaaatcaatttatcaatttgatgaaggtggcgacattgtcgcatgcatggattgtgagaaaaaagcatttgaacattcaaaaaactaaaccaaagcgttattttgtagccatgtaaaaaaagtgcatatttaatatgtactcttgaaaaaaggaggcacttttgagagatgagacataatacagcgtatgctcgtctcaagtaaaagtgcatcgaactcaataaaatatttgttttggagggaaatgaaagtggcgaaatgcaattatgttggatgtgacaatgatgcaacaaccaaaggttttatatttgctagagatccacaaggcaggaaacatcttcctacagatgtatacgcttgcgataaacataaaaagtctctcagtttttttgaatataacactgctaaaacaaactaaattttgatttggaggagaacgtaatggaaatcaaagtgaatgagcaaacacaacgtttttatctagcgtttgatgaatgggtacaatgggtacctgcagttggtcatggaattaaagtgggacaatatcatttttgtgcaattccattaagtgactctattaatgtttcagaagtaacgtcaggtgtgaaggctataagtgtccctataaatttaaaggtttggatgttaacaagcactaaggaagatacaatgaggtttttagaaaaagttggtgagcatttaaaaataattatggaagaacgaggggattttgatgagttactcaaaaaacagaaaaaaatagctttcgaacgtttaggtgcgatgccaccgattgaaaatattgatacggattggatatttgaggaggaaagtgaagttgtacattaattgatacaaaatctttatttttaaattaaagagcgccttgtaaagctcctctgatacctaatcataatgaaaataacgagctcatatagggaagtatttataataattagggatcattatgttccagcttagatttctcggctggaggaataaaatgctcacggacaaagttttgataaatcataccgcttataaatgtaatataaaacactacacacaaaaagattaaaatgtatttaaatacctttttcaaattagcaccaccctaaaagagagttttaataggatgtgtaaaaaaaggtacgattatacaagggcggagcggttagcaagaataaaataaaaacgttattttaaatttaataaaaaaaagagcacattaatgtatgtgctctaggtaaatattttaaaaaaaggagtcttaaagaatttaaattgtcaatacactatatgtttgtcttaaaaaaatgtgcatgagataaaatagaaattttatttgggtgaaagtgaggtgtaggggctggaattagttttttggatagttatcttcattgtaatgggccaaattgcttgtacaaagatggatttacaacaatttttagatacttataaggaaatgctggttatacaaaacaaaaagattgatgacttattgagatatattaataagtgttaattagtagaaaatatttaaaaagaaggacccacattgagggggtgggtccttttactgaagccaggcatatatactaagcatatagagattaactatatattaccaaaaacgaattgaaatttctatgtgctaattgttgagaaataatttataaaagttttattttgtagaaaatcaacaaaataaaacgagcacttgtgccagagtgcccgttttataagatgacatcatttattatgttatgtttgtgagtcatgaacaattaaatgagtcgaaaagtaaggttcgaaatagtttatgtacctgttaataaataggtgcttgtactaaaaagaagtgaagaaatacaagggaggattattggagttccggcttatcgcccatgtatagtatgtgctatgtatgaaaggatattcagatttgcaaaaaataaaaagagcaccttcgaacagtgctctttcccggaagtgtatattacatggacttgcaagaggtttttaaggaataaaatgaataagctcgctcctgaaaggaagaagccatacaataacatatgaaaacgtcgtcgcaggagtgacaatgaaagtatttaaaacccaacaaaatgatccttttaagtggtatttgaatgtttttttgtaatttcatagcgaaaaatattttatcagaattggtaggatgcacaaatttactgtcgaattgatacatgaactagaaggagggagacagtatatgctatatcatttgataaaattaggggaagcattagaatctgaagtaaagcaatctgaggggagattatattttgattcagttaattttggagtttgggtgtcaaaaagtattttgtatatcgaaaagtatcataaagattcttttatagtaaatcaaatgaagcaaagttataaagaaatagattatacaaataattatacattttacaaattgatgttaagtacattgaaagtaatacaagaagaggaaaatgaagaaaaagaggaggctaaagcataatttataatcaattgaagggaaagtcataaggttatcatataagttttgagtagaagaatggaataaagtccggctagaaaactagaggacaccaattcattaaagcagcaattcaagctgttttaggaataggtgtccttttattttgagaagggagatggggagatgaaggtgttgagagatcaattacgtgaatggaaaagcaatcaaacaaaaaagaaaactaagaaaaaacgaaaagagaagttaagcactcgtcaaattgaggatttaatggaggggcataggccttgttatgaacgaagatatggagcaataagagaaaagtaatttaaaaataaaaaggagtggtctggaatgactaagcaattatctttcttaccaaaaatcgatagagcagcaacgcaagagcaattggaggggatgttggaaagtgtacgtatatataagcaatttggaatgatacgtaaggaaatgaaagtcactccttcttatgaaaggaaagagcatggtcctacacatgcagttggcaaaccgttagaagatgtagcaatctctaatattcaacaaagcaagcgtgaagaatgtttagagaaaatggcatttcgagttgaacaagcattaagtcgattcggaaacaatacagttggaaaaaaccagagggacattatagttaaacgatatttagaagacgaagatgtatgcgattatatggtatataacgaaattggcatgagtgaacgtacgtatcgacgtgtgaaagctagagcgttttataaactggcctttgctcttagactagaagtttatgaaactgaagaaactggagggaatgaatcatgaattttgtccagcccatacgtgattcagagcaaatacaacaaatcaaagaatatttaaaagaaaagaatgcacgtaactatattttatttgtaatgggaatcaatacagggttacgtatcagtgatattttaaaactaaaggttggagatttaaaaggtagtcatatctcaatgcgagaaatgaagacaggtaagcagaaacgcatacaaataacagcagcactaaagagagagcttcgatggtttaatgaaaatagagaagatgatgagtacctattaaaaagtaggcagggaaaaaatcggccaatcggtcgtagtatggcatataagatactaagtggagcggcagcagagttcggattagatgaaataggaacacatacgctaagaaagacgtacgggtatcacatgtacatgcaaacgaaaaacatagcattacttatggagatattcaatcattcgtcagagaaggtcacgttacgttatataggtgtaaaccaagatgcaatggataaagcaatgactaggtttaaaatctaatcattgcttttttctttttacatctatacagttactcataaatttcgtaatgtgtaactcaaaagagaaagtgaaatgaaatcaatgataccaagggttttggcgaaggggtcagttacacacaattaaacatatgggtaattggaaggtataaaatatgcacatgacgtataagaactacctatcgttgtatacgttatctctactcatatattatactattgttaacaccatacctcttccacgtactacaggaaagctgttatatcccatgatgtaatacctcacttttgtttttttaactccactacaaacaaacatgtgttcttttttaaggtttgaaaagggaccattttgttaacatgaatattcaaaaataattttttcaagttagaatattcaaaaacttatttatgcaaacaagcatgtcatgataacatttaacaaaagggggtagaagtagatgagtgttgacattatttctaaagaagaaatcacaaaattattaaacgaatggtatcaagctatgatttcacaacgtgtattacagtctcagaaaataaaagaagatattgcaaataaaatcaataatattaaggaagaccaaacaatattagtctactacgctttattgaatgcacgatataaactgctaattcgggatatggatagtacaaaagatattctggacaaaatcgagcctttatcagagtctacagaaacatttttagagtactatcatcatttatttaaagcaatttacgctattaataaagcaaaccatagtgaagcaagaatgcaatttgaaaaagctgaaacgtttttagaatacatgcatgatgaaattgaaaaagcagaatttaattattggcttgcagtccattactatcacgtattaaaaccgatcctagcagttcaatttgctacaaaggcgaatgaagtattttcaattagtccagggtatgaattaaaaactgcagcatgcttaaatactttagggatggcacacattcgactaaatgaattcgaaagtgcagaggaatatttactttcagcactaggtaccttccaaaaatctaatgatgaacttcttattaaacgagttaagcataatttaggacttttatacgcaagtcaaaacatgccagagttagcaattaaacacttagaggattcattagaaaataacgctaaaactatgtttcttttagcaagagagcattttaagttaggttatagtcatatcgctaatgaatatattgagaatggctataagattagcgacttatgttatcgtcatcatttccgaattttaaaagcagtacataactatgtaccgcaagaagaattagaaaatgtggttatagaaggtatttcgtattttgaaaaagaagaattatatgattgggtaaaagaatatgcttatcttttaggtaatatattctatggttcagaaaatcacgaaaaagccagcaagtatttacacatcgctttagatgcagacaaaaagagtatagaaagaagggcgctaaaatgaaaaaagcaatcttattaatgatgatgttatccgctgtttttacttttggtcttactaatgtaaaagacataccacaaaacgaagcaattgaagtgtttatggatcatggagaacatatttaaaacctaaggaagagggcgcttatagtgtcctctttttaatatctattatttatatgatgaggttgcaggtacgtcttttggttattgtttgataaacgtaagatgtttctaaaaatgtgtatacaaaggtgtaattttgtactgtatatgttcacgtactatataaaaaagtatgaaaatctataaaaataattatttcaataaaatttgttttagatattaaaaagtgccaaaacccttgtggtataaggggtttggcacttttgtgttttttatattttatcaaataaacaattctaaaactgttcattcttctcccaagattcaacgatataatgtgcgatcgtcggattgaagcctttaccaactaaaaacataatcgcagcaacttctgttaatgcgtgttcatgtgatgtatgttttgcttcatttaaaccgtaatctacccatggttttacgaaatctagtacgggtttcttgaaaggtaaaaactgtgtaccgacaacttgttgaatttgttgttgtgttggttcagtaattggtccaggtggtaagatttgtggttgagttggatctattgttggtggtttaggtggtgagacacgtacgtcgtagtttggttgatacatttgttgttggtattgcggttgttgtggttgagttgtgtatggattttgttgatattgttgttcttggttttgtggtgctacatatggattttgttgatattgttgttcttggttttgtggtgctacatatggattttgttgatattgttgttcttgattttgtggtgctgcatatggattttgttgatattgttgttcttggttttgtggtattacatatggattttgaggatattcataatttggacgtgtttcatatggattttgttgaaattcagtttcttgattttgcgttgttgcatatgggttttcgtcatattgtggttcttgctgttgtaactcttgttcttcgtattgttctgtgtatctctgttcttgttgttgaggatacaatggttgccttggataaggcggttgattattatagaacatgtttattcctccttcatgatgatgcctaccacctagtgtatgggcggacaagaaaatatgtgatgaaaaaatgcgggcgtgttacaataagtaactgggtgaagataaaatgacaaaacaagaaaaaattcaaaaaacaattacttttgtaaaacatattttagaaaaagatgcgagtgggcatgattggtatcatattgaacgtgtacataaaatggcgatttctttatctgagcaagaaggtggaaatcgttttataattgaaatggcagcattacttcacgatgtggcagatgaaaagctaaatgaaagtgaagaagcaggaatgaaaaaagtttctgattggttagaagagctacgtgttgaagaaaaggaaagtaaacatattcttcatatcatcgccaatatgtcttataaaggtggccatggcggtaaagtggattcacttgaagggaagcttgttcaagatgcggatcgcttagacgcccttggagcaattggaatagctcgtacctttgcatatggcggggcgaaagggagattaatgtatgacccaactattccgccgcgtgaagaaatgacgaaagaagagtatagaaaaaataatgatccatctttaaatcatttttatgaaaaacttttgaaattaaaagatttaatgaatacgaatgcagcaaaacaagaggctgaaattcgtcatcgttatatggaacagtttattgaacaatttatgaaagagtggaatgcacaaatatgaaaatgttaactgtggagaacttatcaaaatcatatggagaaaagccgttatttgatggattatcatgtagtattacagaaggacaacgtgtcggaattatcggtgtaaacggaactggtaaatcgacattattaaaaataattgcaggattagaaactcctgatacaggtgatatgacgtattcacgtgggtatacaattagttatttatcacagcaaccagagtttgatgaaaaactaacagtattagagcaagtgttccatggtgatacacctttaattcgtcttcttcgtgattatgaaaaagcactattaaatattgaaaaagatccaagtaatgaaaaagtacaggaacaattatttgcagtgcagcaacgtatggatgcaatgagtgcatgggaagcaaatgcaagtgcgaaatctcttttaacgaaattaggaattacagatttcactgcaattgttgggaatttatctggtggacagaaaaaacgtatcgcaatggcacaatgttttattgaaacacctgatttattaattttagacgagcctacgaaccatcttgaccatgagacagttgaatggttagaagaatatttagcaagatatacaggtgcggtattacttgtaacccatgatcgttatttcttagatcgtgtgacgaaccgtatttttgaattagataatggtaaattatatagctacgaaggaaactatagtacatttttagaagcgaaagcacttcgtgaagagcaagaattggcacaagaatcgaaacgccaaaatttatatcgtcgtgaacttgcttggattcgtcgtggtgcaaaagcccgttctacgaaacaaaaggcgcgtattcagcgttttgatgagctaaaggaactagaaggaccagctgcaaaacagtcagttgatattgcacttagcggtagccgtcttgggaaaaaagtacttgagttaaaagatgtaacgaaaaaatttggtgataaaacggtattaaacaactttaatcatattgtgaaaccaggcgatcgcatcggaattattggagcgaatggaagcgggaaatcttcgctattaaatatgcttgcaggtaagttatctcctgatattggtgaaattgaagttgggcaaactgtaaaagttgcttattatacgcaagaaaatgaagagatgaatttaaatcagcgtatgattgaatacattaaagagattgcagaagttattcatacgacagatggaaaagtaattggtgcatctcaaatgttagaacgtttcttattcccgacgcattcacatggtacaccgcttggtaaactatctggtggtgaaagaagacgtttatatttattacgtattttaatgggagaaccaaacgtacttttacttgatgaacctacgaatgatctagatacacaaacattaacagtactagaagattatttagaagatttcccaggtgtcgttttaactgtatcgcatgaccgttacttcttagataaagtagtagatgaactgttcatctttactggcggaggcgaagtgcgtgaattcctaggtagttatacagattatttagaaatggaaaaaacgagagaacttatggagaaagcggaagttcaaaaagagaaaaaagtagtagaagaagctccaaaacaacaacgtaaacgtaaactttcatataatgagcagcgtgaatgggaaacgattgaagatacaattgccgaacttgaagaaaaaattgagtcaattggagaagaacttgcgaaagttggatctgacttcacaaaggcacaagaattatctgaagcacagcagaaaacagaagaagagctagaaaaacagatggaaagatggagtgaactatcagacatcgttgaaggattaaaataaaaacaagctgcatatattgaaaagtaaagagaaaaactttacactattggtagaacctattttaggagggaaaaaatgagaacatctaatccaatgttgaaaaaagaggcattccgtaaagagggagcaagcgcttctgcgatgacgattggcggaacagtaggcaaaacgttcattatgcttatcttgctacttgcaacgtctgtctattcatacatacagatgatgcaggggacgatgaagatgccagtattaattggtgctttaatcgttgcggcaatcatcgcattcgcgtctatgttcttcccgcgcatttcaccttttggtgcaccaatctatgcagcggtagaaggggttgtgttaggaagtatttcagcagtttatacaatgaaatttggcgattctatcgttttaaatgctgtattactaacaatctcaattctatttgcaatgttagtgttatatgcaacacgcgtagtaaaagtaacggataaattccgtacaggcgttatggcagcaacacttggaattatggttatgtatttagtcgtattcctactaaatatgtttggtgtaactgttccatacattcaccaaggtggtacaatcggtattattattagtgcagttgttattgtagttgctgcattaaacttattactagatttcgatttaatcgaaaatggtgtacgtagtcaagctccgaaatatatggagtggtatactgcgatgggactaatgcttacattagtatggttatacttagaaattcttcgtttcgtttcttactttacgaaaaatgactaataaaaaaatcctgcatgaaaaatgcaggatttttttattttcaaagatatattgaatgtatggtataatatggatgatagcaacttgaagtgaaggagatggaatatgatgaaagagaagaaggggattatgaaaaaattattttctaaaagttttttcatagaactagatgaagctttaacgtatccatcatcaaaagttattacttcagcgattgaaggatatgcaactgaatgcaatgaaagactaaaatttgagagtaaagttaaaccgattactttctacttagaaaatgtaatgtaccgtgctgaaataaagatggctcgcggaggatattacatatcttgtactgaagtgtaataaattttgaaactatacatgtttgaactatgtatggtttctttttttgttttgtaaggtccaaaataatactttctacttacggatatatcattttgtgctttttaccattcaaacatttctccttacaatgaagaaaaacatgtgaggtggtataacttatgatgaatcttctctgtacataatagtgctgaattttaaaaaaatgtacagtatggggtactaacacatcactatcaagctaagattatacaatatcaagtatagtagagattatttctttcatttgtttgttttgtggtataagattgtacgttgttcttcttagatttaaagcgcggtgcgctgttttgttttttgaaaaagcgtgtataagcatccgcaaggttgcgaacagacgactgaatcgcaatactatccacttcttttagccaaacaagctctttcttcatggcaggtagtttggcagagcatgtaccataggtcaagccttttcctgtctctttgtatgcttgatcccataaggataggaaatgattgaatacaaagcgagaacacccaatcgttttgttgattagaattgcttgtgcctgatttggatagatacgaaacttataggctttattcatcattatttgattcacctccatttcggtatatgactattatacaccaaacgtacattcgataggtagtggagtaacactttctgtatgtcgaacaattaagatggcttcctgccatcccttgttcgaagccaattcatctcccccctactcactgggctgtgccctccacgctccttgaggaaggagtcttcttggctaaaatgataaaactacttatcttattaaattaagtagttttatgaagtatcccagtttatagagcaggataattataatttcaaaatataaaaacttttagccattgttatttcattacctatgtttagttctgtaatcccagttttagaataagtctttgttgaagaatgtatacaatagaatatcaaggttctattagatgaaattctgaaaagtaaattacgtacagtgctggagatagaaggttttttaaaacggcaaaaaattagattaacattagactgtgtgaacaaattgaactataaataagcagctgcactagtaacagtattaaggcttattttgctactcttccatataatgcttctagaagctttaatttaaaaggaattccatttctattcgtacaaaattgacactcctcccctaaagtggccaactaacgtcagtaggattcttgctaccaaaggccaaatccatttcttgtaccgctgaagtgtaaagattgcggtgtgccatcaccaatcccacaacagaccgtatagtttcgtaggctatggtactgtgatcataccgtacagattgttggttctcaaatgtatttacgtcttttgcatgactatgaataaagtataccttgttttgctatacaaaaacgatgagttcatcccaagtctaaagacggactaaagtcctgcgtaggcttttctataccgtaaattctgtgaacggtattttaaaattgtggtaacatgagcctagatataatatattcaacaaatatcttaggatgcatgagatataggacattcctttggcaaggaagtctctgcccttaatgaccgtgaagcgtctcatcctagtgaaagggataggtaataattattgttcttaaaattctgaattttatatattttatttatacaaagtaatttgttacttattttatattttattgttagaatggataccaagttgtaggaggtgatttacataattaccaatattatcttttcaattttagaaatatggaggagggacgagattgttaagtaatatttttttctttgattagatttagtaatatcattaaaatttatttttttgtatatgataattaaaaaataaaaaaggatacacataaaaaggagatgctaataaatgaaaataccttgttttgttatgcgtggaggaacgtcaaaaggattattttttttagataaacatttaccttcaaataaatcaattagagatgaggttattttaaaagcgttaggggcaggaaatgctcgtggtgttgatgggatgggtacgttagatcctttatcaaataaaattgcaattattcgaatttccactacaccaggaatagatattgattatttatttttacaggcggatttaaagagaaggatattagacgatagtgtaaattgtgggaatataattgcagctgttgctccttatgcagtagagagcggattgattaaagtcgggtcaggaaaagaaactataacaattagaaatttaaatacaaatgtaattgttgaatcaactatagccactaaaaacggaaatgttgtatataacggagatattaaaattgacggtgttccgggtacaggagctccgatagatttgaattttaaaaattcaatcggctcagttacagggaagttatttcctacaggtgcaaaaacggatgttattaatggaattaatgtatcttgtgtcgatgtatcagtgccattaattataattcgagccagtgaattaggaattataggaaatgaaagtccagatgtgttaaatgcaaataaaacatttttacatgacattgatcttattagaaaaaaggtggcttgtcttgcaaatttaggtgatgtatcaaataaggtcatccctaagattgcggtaatttcaaaacctagggaatctggcactattacatcaagatattttattcctcaccaatgtcatagcactcatgcagtaacaggatcgctcgcattatcagcagccataaaaattaatggtacaactgcataccatgttgcaaaaaataatgatttaaataaaatgaaaaaattgaatcaaattataatcgaacacccagcggggaaaattcaaacagaatcagttattgaggagtcatctaatggatatgtaattaagaaatctagtattacacgaacagcaaggttactttttaaaggcgaattaataataccttgatcaatgcattgtttttcttgatatagttttaatggcacattttttaagcaccgagaaatttaaagaataacgtttctcggtgcttatatttattaaggaggcttaaattaaatggataatcttaaaaaagcgacattttttatggttctttcaggaattagcttttcactttctggattttttgcagaacatgctattatatcaggagatttctttgtaactttaacagcaaggttttttattccttttctattcttagtcccttttattataaaaagaatggggaaaatttcattttggagtaatagttataaacaattacctcgagctttttctattacattttcacaggcattattttttttatgtgcagctaaaacctcacttttcatagcaatggttttatataatacaggtcctatttttatctgtcttattacccttttttcaaagacgagacgtgcgacaagagcagaaatattggcagcatttgtaggtttttttggagtgtttcttgttttaaaaaccggtggtattgattatgaatcattcctttatttgggggtaggtttactttcaggattatccttagcattttcacaattttttttacatagaagtgcacagacggatgataatctatccattatggcctatacatacctatatggaacaataatatcgggtgtactctctgcatgtttttcaaaggggaattatattggtgtatttacgaatagtacaatggtactagtatttttatttttaatggcaatgggaagtttagggaatcaatggtttagaggaagggcgtataagttaactacgagaatttcaaatttatctgcgttgttatatttaaacattttgttttcactgttactagatatattgtttaataatagtattccatcagttattcaaattacaggtgctatttttgtgatgggtagtgctgctattccaattatagtacgtgtaaataaacagcaaacagaacaaagaagggcagcaagttcataaaaaatagagtagataaaaggtttccttccacaaaaacatgtagcagttgtgaaagatatgtcattgtctgaacaagtatattcttgtatatacggtgcaaatcttcatagagattatagtgcagttattaacaacaatgaagcaataagcctattagcatgaatattaataaagtagcctttggaacaagagatttagttcgaccgtcttaggatgaatttcttagctattaaaagcaaagactaatcgagatgaactcacttcgaacagtttgttagaaagccaagtggcgaatagtagacctgacctagattcgaatattcattaaatttaggatgttatagagaaaaacgttatatttatgtatatttttggaagttcctgtgttgtaattcactttgtgaagcattctaaagttcatctctttacagttttttaccttattattctctatgtataatactattgacgaagagagtgtatatcctctcttctttttttatcattttagccaagaagactccttcttcaaggagcgtgaagggtcctagcccagtgagtaggtgggagatgaattggcttcgaacaagggatggcacacagaaagtgttactccactacctatcgaatgtacgttaggtgtataatagtcatataccgaaatggaggtgaatcaaataatgatgaataaagcctataagtttcgtatctatccaaatcaagcacaagcaattctaatcaacaaaacgattggttgctctcgctttgtattcaattatttcctatctctatggaatcacgcatacaaagagacaggaaaaggtttgacatatggtacatgctctgccaaacttcctgtcatgaagaaagagtttgtttggctaaaagaagtggatagtattgcgattcagtcgtctgttcgtaaccttgcggatgcttatacacgctttttcaaaaaacaaaacagtaccccgtgttttaaatctaagaagaacaacgtacaatcttataccacaaaacaaacaaatgaaaacattgctgttgtaggaaacaaaataaagttgccgaaactaggtctcgttcgatttgccaaaagtcgcgaagtaaaggggcgtattttaaatgctacagttagacgtaacccttctggcaaatactttgtgtcattgttagttgaaacagaagtgcaagaacttccgaaaacacaatcttacattggaatggatgtgggactaaaagatttcgccattttgtcagatggaaccatctataaaaatccgaagttttttcgatcattagaagagaagttggcgaaagcacagtgtgttctttctagaagaataaaaggatcttctccctggaataaacaacgagtaaaggtagctagaatccatgaatacatggcaaatgctagaaaagattacctggacaaaatctcaaccgaaatcatcaaaaaccacgatgttatcggtatagaggatttgcaggtatcgaatatgttaaaacatcataagttagcaaaagccattagcgaggtatcttggtcacagtttcggaccatgttggaatataaagcaaaatggtacggcaaacaagttattgtcgtatcgaaaacctttgcttctagtcaattatgttcttgttgtggataccaaaacaaagacgttaaaaatctaaacctacgtaaatgggactgcccttcttgccgtacacatcatgatagggatattaacgcaagtatcaatttaaagaatgaagcgataaggcttctaaccgcaaggactgcggggatagcctaatcaattagagttcgatagaactctttacttaggaatccctcacttctaaacgaagtgaaagtgggggtagttcaaagatcttgtatttcttttttagtgaatagctttttagtcattttaaaatttctccggttctaaattttctttctataatacaagaaataccctatcgaatagatttttttacggtctatttaatagggtacattttatacagatatttacttttataataagtgtgcaagttttgtaatagtgctctatttattctaattggagtatttaagctagatactcctatatggatatgtaattttacatatccatataaaagacagatatgtattaatcactattaaattatattgatatcatttttaggtgagggattcatttagatataaaggaattaatggatttttatgtttaattatcatagtataattatttcactttatgaaatgaaatttggatttaactttttttaaatataatattatataatttgaatgaaaaaatatctgaaaaatcaaatttaatcaaagcgattttctggtttacttatgaaaaacatagtgtttaaaatgagggggaagtaagctccttatattctatcaaaaataaataaaaaaaagagatgtaattacttttttgaaaaaatctctatcttcaagtatgtgtgaagaaatcctaacgttaggttgtacaacatttacgatcaaaacttgtaaaaaacaatagtgaagaggtgtacggaatgaagaataaaattatgacaggatttttaataacatcaatcgttactggagcgactattcctatcaatactctcgcaacgccaatcgttcaggcagaaacaaaacaagaaaatatagatatttcctcagcattacgaaaaataggtgcacactccaaattaacacaaacctttatcgatggagccttatcaagtccgaatgtacaacttgaagaagttccatctttaaatacaactcaatttctaattaaacaagatatgaaagagtggtctcttaaagattagccaattatcaggatttaaattatatgaattgatatgtatcttctctcgtttagttggccttttaccgtttttcatgcgtatttctctccccttttctctttattttgcaaacaactcatccactgttgttttgaagtattttgctagtttctgagcttcttttagagtgaaatcacttttaccgtgctcttttaaataatatgtttttggggctatattgattaaatttgcagttgcttcttgcgtcatgcgttgctcttttcgagcaataaataagtttttgtgcatggataccactccctatataggttatatttacatcaacgcctaattgaagcgtttccttcaattaactttgggtaaaaccgttcaaaaacgaacgtttcgttcgtattggggttaaaaaaaatctcctctattgattcatctaaaaagtcagctatttttttagcaacttccatggatgggctacgctcttttttatctagcattcttatatacctttcagtaactccacaatgttctgcgattttatgataaataattgattgtttcatgtctacctcctgtaagaacgttttgttcgattacaatcatatcgaacaatttatacattgtcaatgacttttcgaacataatgtgctatgattaacctcaaagagaacaagttgttcaaatgaataactttatgaggtgattaaattgatgggcataggggctagaataaaaaaacttagaaaacaacgtaactggacgcaagaaatactagggaaaaaggtaggagcttcgtctcgtgtaattggttattatgaatccgaagaacgctttccttcaccagataccattgcaaaattatctgatacattagaagtaacaactgatttcctactaggacgtggtaacgaattagatataaagaaacacacaaaatttaaggaaattatggaacgattagatacgctccctgaggaaaaacaggaaattgtacttcaacagatgttggcgataaccaaaacattagaagaatatcataataacgaaaaaaaatagcccctcatattggagacgggctatcttttaaattctaaaactttcttctatatattcttcaattaattccggtttagcttcatctactgtgttcaaaaataattctacgatctcttctttcgtcatttctattccccctataagtccgtttaatcccatttttatttactcttttccaacagtttaggctctatttgtcgaaaattttatcatatattgaaaggaaaaatagaagagtaaacaaattctttatttctttttttagtttaccgataaaactcagtctcattaatagagctgccccaaataaaaaagcacagcatatgctgcgctttttagccacctggtttaatttctacagattgaaatgaacctttttttataatattatacgaaacactactcacagctaacattgaaaaggcgcaaagtactaaagtaaattttttcattttcatccactcctttatccatattataatcaatcatttgctgtactagcaaggaattatcccctcttctatttatttctttagctactaaacttacaaagaggtagttcgattgaacaagaaattctttaaaacattcgtatattctgttaggctctgtatcagtgattgctagaaaaagtcttaaaaaatctctttctccatttgactttaaaatttcttttaatccatctcgtgaatcttcatctgtgggattattttgaaaattgattaaacgtacatctgaatctaatggcaaactaaggtttaaatacattttgacaacatctaaattataacgcgctgctgcttcaattgaagcgtcatttacttttttggataaattataactttcctgtaaatactctaaacaaagttcctcatcatcaattaaatatgacatccccaataaatataaagcatctgaaacagtttttgtacatagatttgcttctattaataacttggcataatatcttgaagactctaaattttttctttgtagattaagcggggaaaacacttctgcaagtcgatacatataacattccttaagaaacattttacgatcactctcatcaattgagattaactctttctcaatttcgtcaaccaaatcaaacattgcattgaatttcttttgatgataataatcgtaacatttcataatatcaatcaaaatatttaacatgttatcagaaggacggttatacatctttaagcacttaataatttcagtacctgaaatttcatcattcatatacttatataatactccataaacatttacatactctgcaactgtaccagattcatttttgtgtttttctagtaatttattcaataaaaccttatcacgaaccaatgctgcatattcaaaactatgcttaatggcttctgtactatctaattctacgcaccactcatgtaaaaacattgaaagctcttcactttttgtacttacaactgaagccaatctcagtaaattaggaaaactgatgttaccttgatttttaaacttttgtaaatattgttttgaaacacccattttatttgcgacatctgtaaagtttagatcgtccctgtcttcgattaaatcacatatttttttacgaaaacacataaaaactcccccttctccaaacataaatcctccatcctaactttctcaatggtaatattttggaaacatgatatactaagattgactcatacggggcagttgtttcctaagcgatggttaggtaaacggtgtaagaggaattttcagctcgcacctcttacacacgcttctatgggtctttatttatgttcaattattatttttcagtttgataaacccttggtattactgagtttatcgtgaaacatatacacaattattataacacgtatacatatgtgaatcagcattcaggaaactttctcaacaattgtttaactgaaaaaccaacaatcattttcaaaactctgaattcgtaactttctaacatatatggttatatttagaaccagccactctaatatatgtttaaccagccaatttatttttttatcaatcttaagatgttctgattaggacatcttttcttttggtaacaaacaagttataatctactcaataaatcgaattatcaatctttatatatgcaggaggattttctatggtggtctacaaagataaagaacgcggaacatatttcttcgttgtcagagtccgtcagtttgatggcactcaaaaacaagtaaaacgtcgtggatttaaaacaaaaaaagaagctcgtgaagcggaagccaaaatgttagtggaaaaagaaacaacttcaagtttaacttttgctcaagttgctgatagctattttgattggtattgccagagaagaaaacagtcttcaattaacacaattaaagccatccttgaaaatcatttactaaaaaaattcgggaaatcaaaaattaacaacataactgctaagcatatcatgatctaccaaaacgaaattattcataagtattcagctgtttatttgaaaaagattcataccgtactgtcctcaatttttaatttcgcaataaagttttttggtctcacaagtaatccagcaaaaattgctggcaactttgaaaaagaatcgaataaacgattaaacttttgggagtttgatgagtttaaacaattcattcatgtagtagatgatttactgtatcaagccttttttacgactctttattatagcggggcaagaactggcgaattgctagcattaacatgggaagatattaactttgaagaaaaatcaattaatattaataaaaccaactataacagacaagttacaaaacccaaaaccaaagcatcaaatcgtattattatgctaccgtctcttgtcatagacttattgaaaacattaaaagaacatgctacattaggagcaccgataaaaaatgattatattgtatttggtgaattttacacaagtatagcgacagctacccttcataaacgttttgccaaatatgttgttgcttctggaataccaaaaattctacttcatgaatttcgacattcccatgcatcttatttaataaatagaggtgtcagtccacttgtggtagcccagcgcctaggacattcggatgtgtcaacgacgttaaatacatatagtcatttatatccgtcaaaacaagcagaagtggttgcatttatggaacaagatttatcattttcgttaccaattcgtgacctacgccctttaaagagttgatatcatgcaattcgcaatgatcagagtaatcattatacgtatatttttggaaccatgatgtaacagtccattgtggagattgcggctgtaacaccttattctctatatacgatgggttcgcatggtctttacttgcaataatatagtctaaatactcagcaggactatcagggaaattatattttgcaatactgtttgtcgttgcgtcccaagtcgctgtatgtccagtataagatggtacagaagcgttcaatgttttaaacatagatgcatactctgagtcattcttgttctctgcatttattttatttacgttcatatcaccaccaattaacacatactcattatttggtatatttttatttttaataaagtcttgaatttcttttaattggtctgtacgtacagatgcaggtgaagtttttccgcacatactatcttccgcttgcaaatgcgtaccaattacatgaacaaagcgatcatttttcttaattttcgtgtatacaaatcctttattcgataaattatctggcccgcatccttttgcaaatacatattgaatcttttcagcgattggccatttgctcacaatcgcaacgccaccatcttcaggagttgaagatgaatagtttcctaacgttttatcccattcacttccactactacgacctaatactgctgtttgatttggatattctttcttcaaattccctaataaacgatctgatgcgctattatcaaacacttcatttaatataactacgtcttgattctttatataatctgccgccccgattaaatcagcacgctcagtttgtccccagttcggatataagtttgttgatagcatatatacattatgcgtcatcacttttaatgtatcggtttgatttgtagacgcttctgcttgagctgacgttccactatataaagctcctagaccaacacctaagctaagtacaccttttagcaatttacctttcacgtttcatacctccatgtattgtatagtgataaaaaggccaaatactctattctgagatttgaccttttttaaatacttaacgatttccgtacgtatcaaaccaaagctgaatatatccagcagtaacacgttgtgcatccattaaacgcttacctgtcattggtgtaacttcagcgcgccatttatctgcatattcttgtgatacagcagctctcacgaaccaatctttcgtattatcatttacaatgccagcgtaatcttgtttcgcaactactgccgctccatgaatccaatcttctggattcgtacctttccagttccaatatccatttccatccgttactttatagttatcttttatcgtatctacaaagttttcatatttagaatggaacccttgtggatacgaaaggtttgtaaagtttgctgcatgcatcggttggtttacatcccctagataatgaagagataatcctaaatagaagaatgcttgtttcatatctttatttttgtaagactcaccagctaatttaaaatacttagctccagtttcctttgcctgctttgcatacggaatataagttttcccattgtcagggtcatagaaatgtgaagcaaatgtgctattatcataataaggattttcatagtcagcagcataaataccgttctctaactccgtacgccattcatttaatagtgcaactcgatcttgttttacaagtgttgtattacgagacataatatcaattgcacggtttacaatccataaatgagaattcacgccttctttatgtttatcttcagcagaccagcgcggaataactccaaatctctgtcccccatcattttcatgagcaaatgcaacactttgtaatggagcaactaatgtaatagctgccgctaaagcaagtactttctttttcatataaaatcctccattttataattgaattattgtaaacattttgttaggatcctatgatgtcgtccggttaacctatgactagaatatcccacctttcacgaaatttctatcaataaattaaaatatgcaaatgttcatatcattataactttatacacagtgaatataatgaatgaatacactttcattttaataaactattattaaggcttgtctaaactaatgtaaaaaaagagtaaagcatctgaacgcttggtattatcccctataggtagacagtaaaaaaagagtccatctgatatgatggactcaatactgttttatctggagggttaacaatagtataatatatgagtagagataacgtatacaacgataggtagttctctttttttgtctctttgtagaagctataataatagtataaaagagatagtatttatagtatagatagattgaacagttggaggtggaaaaatgtttaaagtacaaagtattattacatcgtttggggaagaacgttggatggttttacataacaagggtgaaccagttatcccaatcatgaaatttataaaacataaggattctttaggaaaagcacctaatacacttaaaacatactgttatcatttgaaaatattctggtgttttctaaacgaaaagaataaagattacagagaagtggatataagtttattaacagaatttattcattggttaagaaaatcaacagatgatataaatactatctatttaaatgacacaaagaagttagtgtacgctaaaagaactgaatcttccgttaacttaatcactaattgtgttatcgaatttttggactaccaatggcgtagtggtcaaatcttatttaatgtaaaatccaaagttacaaaagaagtccataatacaaggcggaagtatcgtaaatttttagatcatataacacataccccaacaaccaaaattaatattttaaaacttaaggaacctaaaagaaaaataaaaaccattactactaagcaggcggaattgattcatatagcatgtaataacataagagatgagttaataattcgtattttatatgaaggaggattaagagcttctgagttattaagtttatggatagaggacttcaatatcaatgatggtagtatcactgttagagaatctaaaacacaagctggagaaaaaagaaaagtatatgtatcaaatgaaacaatgaatttattccaagattatattatcgattaccatactaatgatgtagattctaaccatgtgtttattaatttaaaagggaaaaataaagggcagccaatgcaatattgggctttgcaagctgttatacgtatattgtctaaaaaaacgaaaataaactttaccgctcatacacttagacatacatgtgcaacacaactttatgatctaggcatggacgctggtatcattcaaaaattattaggacatgcccaggtacaaactactttaaatatgtatattcatccttcagaagaaactataagaaagcactgggatgaagcccagcagcataggagaatgagaaaatgaatatcgtagctattaattctaataaaatacaacgtaaagttatgaacgaccttaaagggtattgggctttagatgaatggaaaatcgaagagtttcccctgccagatagaagaggaaaaattaaagaaacaaaaaaaattgttgatttcaataaaattagtaatgaatatattaaactggagataaagtactattctttttattctttaaccaatgaaatttggcttttatccagctttatggagaagcatttttataaaatgtactttctttcaaaatttttagccgagaaattccctcaagtcacatcaataattgatattccttacactacattattagatgaatacaaattatatctaactgaaaataataagccgttaaaatacccccatcatcgtggaggagaatttatttcaccttatcttggagtatgtaaaagtttatatgattttttctctaattattatgacgaacgacctgaacatcaaaaagataaatggaatataaaaagactagggattccatataatatgtctcgaagagacagatttcttaatttcaccagtataaaatttccctttcgggaattagttaaaaaatatgtaaatcaaacattacttatacaccaacaaattacctttgcgaccgcccaaaatattttaaagaaaatgtatttgttttttgatttcattgtagaaacgtatccaaagtggatagatttacagaatctacaaagacaggacattgaagattttttattttatgttagaaatcgtgaaatgggaggaaagagttatacgaaaaatcgtgttcctagtaatcgtcatgtaatagagtgcctttcaaatgtcagaagaataattgaatatatgcaaggttttgaatggaaagaagcacctaaaacccctgttaacagattaatatttcccgaagactttcctcgaagagaaaagaaaaactatcacgaacatgttaaacatgtgccagattttatatgggagcaagtgttggaaaatctacataatttagattcggaaattgcacgattaatagtcattatggaagcaacaggatttagagtctcagatgtatgtcagttacaattaaattgtctagcatataagcaagatggttggtggttggtaggagatcaacgaaaagtaaatgtaaaagaacatattgttcctatttcagaagaaattgtgaaaatcgttaaaatacaacaagaatatattaacaatcatgaaaagaagcataacaacttaaatcaatttttgttccctgttcttactggaaaaaatagagggatggccttttcacaaaaatcggttacctatgcattaaatcaactagccgaaaaatataaaatccttgataaaaatggagaaatatttctatttaagaaccatgcttttcgacatagatatggggtcaatctaattaataatggtatgaatattcttcatgtacaaaagttaatggcacatactagtcctgaaatgacattaacttatgcaaaaatttcagataacactcttcgtagggaatgggaaaaagttcaaaactcagtgcgtattgacacaactggagaattaatacaagccagtctccctgagcaggcagaagaaaacggtttggaactagaatggattcgccataacatggactctattcgtttggatcatggattatgcataaagagtcctaaggttagctgtgaattcttagattattcgttagaaaccccttgtattaaaaataattgtaggagttttcatgtagatacaacatttttagattactataatgcgcagatattaaagatggaagaagatattataaagtatcaaactagcggtcgtattcgttctattgaattgattcaaccaaaacttaataagtataaggaaattagggattcattgaaaaatgaaattggaattttcggtatgccgaaacataaacgagaatatataggagaggaaagaaaaattgatggttaacaaacatccgaatacaacggggttattgaatcatgcctctaaaaaaaagagggaaacacaatatagagtgaatgaagtaatacagttaatggttaaagaaggacaaaaaattaattttaattcagtttcagaaaaagcacaggtttcaaaagcatatttatatagagaacccttaatcagaaaaacgattgaagacttacgtcaacagcaagaaggcatacatgattttaagaatataaaaagaaggacatcggatgcctccaaggatgtaatcatagaaactttaaagaataagctcaatcttttaaaatataagaacaagctattagaaagtgaaaatgagcacttaaaaacacaactgaaaaaagatttaggaaaggtttatgaaaatttataaatatgtgatatcgtcctatcagttgtaaaataacacccttaataaagcaggatttgaacatttttattttaagaaatagaatttaaatcataatgatacatattaaaatcttttgaaaatacctcttgaaccaactgaattgtttctgcgtcataaaaactatcataagtaggtaatcgtggaaaaacaggggttgtaatatcagcgtctgcataaactcctttgtaaatcatcttactcccttgataatgccaagattttgataatagatctaatggtgatttttttaatttatatacctcttctagcttcgaaatacctgtgttaaaattttctagatggatatagtttgtaacaaattcttcttctccttgtatatattgttgtgtaaagtgaggatctacttgatctaattttgtcatgtgtgcttttaagtaatacaaaaatagtttaaaggaaatgggtttattgcaagtttcatcaccatacagaaattgccgaatgggtttccatacgggattttcaatatttggtggtggaaccagagcaacaaaagaacttactgcccttctataaggatttcttactagtttgtacgtcttcttctctttagtttgtaatccattagctaattgtgctaaataatgtgtagagttcttatatacttcatactcatagttgtgaatgaacggattgtactttatcgcttctttaaataaattaatttgataaaaaaaccagtgggctagcgaagtacatccgcttttttggctccaaaacaagatgaggggaaaatctttatgaaaatgagggacacgcccttgcttgtatataaaattatatagttctatatgatccattttgaacctccattcttatatagcaaaacatgaaatatttttaataagcgataactaactttagtccactaacaccaataatgatagctaaaaatatttgaagaggtttaacgggaatcttagtggagaatttactaccaagtatgacacctgggatagaaccaatgagtaagtgaattaataaaagataatctacgtttcctaaattcatatttagtatgcttgcaaccgtcactaataaaaacgcatgtgtaatatctgtgcctactaattcggatggtttcagtcgatataaatatatcattgcaatagcaaataaagagcctgatccaacggaagtaagtcccacgataaaaccgagtattgcaccgataagaattgttaggttctttttttggaccatagtctgtttttgaaaaaaactttgtgtagattcattatagaaaaatgtttttataaaaatagaaattgccgcaaggattaaaacatatcctaatatatattttataattccctctcgattatcatgaaaaattggcaagaaatgaattattattactgcgataattgcactaggtaaactcccaatagctagatattttactagtttaaaattgatggttttctgtttccagtgttgggatattccaaacattttagtgatagaattatatactagatccgttccaacagctacagaaggacttatgcctaatgttagaagaaatggagtcagtaatgcggccccgcctatccctgttactccaaccaatccccctatgatgaaacccatcattataatagaaatgctcattataattccccttccataccgctggcttttcatagtggttatagtttttaaagagactctatacatagtcgggtgataggtatattagttaaaaattaatttcattcttcttatatccatatgcttcaaaatcgtcagtaaatatttctgaaacaaggtttagagcttcttcatcataaaaacttcgataggttggtaatgaagggaagtgtggatttgtaatatcatcatctgcataatttcctttatgaatcatttgatgtgccctatggtgattggagtttgtaaggagtgatatatcagaagaaagtaatccatattctttctccagctgcggaattattgtattaaaattctctagttttatattttgtttgatgaccttttcttctccctcaatatattgttgtgaaaaatgttgatctaacagaatggatttagcccctatttcttttacataatataaaaattgtttaaatgaaattcctttcgattcatttttatcattataaaaatactctctaatctgttcccattgtttcgaggcgtaagggttgtcataaagtattaaaaatgagcttacagctcttttataagggttgcgcacaagttttatggtatccttacttagttccaagagttgcatttctaaatttgtgtagtaatcaactttatttttgtatatttcagattcatagtaatgaatgaacggtgcatatttcattgcttcctcatataacccaatttggaagaaaaaccaattcgccagagaagtacaaccacttctgtgactccaaaataaaattatggggaaatctttatgaaaatgtggaatacgttcgccatattcaattaatcctttaatattgttcttcatcagccaaaccccttcgttattctgatatttattgaacacttaaatacaatggtaactactcataccattgtatttaaacaccactgtaaaggtacttaagttggcatataaaatcccagtgtattaaaaacagcttacataggtgtcttaattttccaggtttatcaaaatgtaataattgcttaacaaactttaaaatatagaaatctattataaagagaattatgtatgaagatatgtatacaacgatagaggcattaatatcgctacaataatcgaaaaaaagtcttgataaataccctagaggctgcctaatgaaacgacctgtctaactttcgggggtcacttcagatgaaggacggctcttgttttttacttcacaaacacataagcttcatttgctgttacatagtatagaatccataatacttttactggtaatccacgatcactagggattttagctaatgactcaacgtatttatcatagctacgtttgaacttctcgcaatctctcgtttcacataattctgcaggaacaaatcgtttatttgcatctgattctgcaccataagcaatgtatatgagaattgtaaacttttcttggatataggatcagaaaagaattaatgatgcaaaattacatatttcatttttatatatttatttataataaaatggaattgctcaacattttcattaaagatagtctatcaacctctaactacctaatgaactcaagtaaacgcatcttaagtcattttaagaggtacaaaaggcacccttttgggtgctttttgtataaaaattctatttttttatattcgataccaaccacgaacctttttaaaataatagtatcattatgtctcctttttagagattatttttaattaccttgaatttttcgcaccagaaccggaaaattcctgactactcgaaatatcaactattaagtgctaatattcaataacgcgtactgaaaatgattaaacatttttataaaccagtggaacatttaagaaatcaatttttctcttatcgaaatttaattagcttacagcaatacagtggtcatatatttttaagaataacggaagaatatatagaaattgctacagaaatgtgaagtttaattaatttaggaggaacaaatttgtttaatcagcttgtaaaagttataccgaatttatttacgattggaaatttattgtgcggtgttttctcaatcaccttgaatatgagtgaatatttaggagcagcctccattctcattttcttttcagctgttttagattttcttgatggaagaattgcgagaaaattaaaagtgaacagtgagtttggcatagaattggattccttagctgatattgttagtttcggcgtcgctcctgcgcttttatttcatacaatggcagcaccttctattttaacttctttggcatttatccttttcccaacaatgggtgctttaagattagctaaatttagtattcaaccaactattggatattttaaagcattacctatttcagctgcaggattatcatttgctggtataggattgttttcatatagcaatgcatagattactttaatcctcgccctcttaatcgtaagtcccattaggtttaaaaaatttcaattgaagtcacgcccagcgccataaaggagcatttcaaatggatttaacgcgtcactatgtataaaaaagcgggacaataatattaaattcggtgccattcgtaaaaattaaaaccttgtatttatggctattgggttaattcatcgatatgttgttctaaaacttcaatacacttttaacaggagcccctttatcaagagagcacccgttcttattttttcttcttttctgtcggttggctttgtttagcaaaattagatgaatcatcaaaattcggttgctttttaccagcattattacttctaccttttcccatatgtaatgcacctcccctcctccttactattcccaataaaaaaattctcttgcatccaagagaatttttgattgggttcttattaataatacccaattacttccaacactgctatttgataaaagatggatccaatgtcaaattctttaatgctgaaaaaagcattacattttcatatttagatcaatttttagatggaccacctatttatccgaatttatctaattacacgatccttccggaaggaaaagtatttatctatcatcacaattatttcataatgacagattccacgcttcatcttatagataaagacatattgcaaaaactttatttattaaagaactgtataccaatttcaaaaattaatttatcctactttaaaatttgaccccctatttcatcatatccctctcactttgtcgaaaaatacttagaataatacctatatttaaaagaatttcttagtggaattttcatcatcaataattattatctaaaagatactaatctaaagaaaactctactggttaaaagctaaccaatagagttttcttttttatctaaggattcttttaaaaagtgtcttttttatagtattttaaaaagaattcctcatactaacaccttattgttgcggctattcatttatttcaatatgatacttttccatctcgtatatgcaatagacaatgatagctaaactccaactgacaccataataattatgtgtgtagaagtcatatcccgccttaatacctttctctattacaacaaatgtaaatcctaaagccacccatttgttaattttcatcttaataaacgttaaagagataattattaaaaataaaatatttgtaagatgatttatcattagctcatatttttgaatgtatactgccatcatacaagcaacgatattagtcgcaatgccaaaggcaaccatcgctccccaacccctgtccgaaagtcccattcctgagtcagtcccttcctgaacaaaaatccttttctttaattcgttccttcatcctattcaaggtatgctaaattatccttgtctgatgaatatctatttatcttttcatatagagcaaacaaaatttctacttataattttttctttattagacaaactatgtctaagccgtttgaactagcggcttcactcttctggtaatgagatagcacaatttattgaattgactaactcattcaacccactggcaccggcaggcaacaaaatagttgtctgccattttcatgtatactttttctaatttcattacaaaccaaatgtgtgctgtattgatttcaaaaggacagaatttcattttttaaaatgtaaaaaagataagatcctatctacttttggtataggactttttcttttcacacatactatttttgaacttgtttaccaatacgtgtcctaatggtgtcttgaattcctcctaaaaagggctgcagatacgactgcatgcccttttatttacgttgctgctctatattgagtaaaataattaaaaactaaaaatgtaatattacatattttttctgttcagattatgttaagattcacttcatagtcgaattatggtttcgtatctaattcagcaatatgtgaactgtttacctaaagaaaagacacccaaaaggtgtcttttcttcttttaatctaaaaaacatttctcctatttagtaagatccaattagccctctaacctaagcctcatatttaaaggcaatttaatcatacactcaagagttttcatctatttcaatatacttataacttaatttccaatcacatttccagcactatatttgctttcttacagaatttctgtcttgttcttaattctgtcaaaatcctcatgtagctatacaaagaatatatgctactatgatattaagaaactatgcgttcccttaaccctgtatccggccctgtatttattacagggtctttgtttattttatttacttttattggcttataagagttaatacacaaccattttcaattaaaaccgtttaaatgttagttagaaattgaaataatatatctattagcttttttaacaaatgaaatctactattagatttctaaatgtatactgtactaagcaccaattaacactatacaaatagtgtcaactatgttaattgaatattggtaatagtaagtataaatattatcaatttactatatattacatttatgtaaaaatagacgtatgttgagcttattcaaaatctttcccctaataaagatttgaagtagcatttcatgattctccttactgttaatatgccttgaaaaagaaccctatagggttctttttcttttcattataacctcagtaagtccttatttaacatgcaaaaaggactgctaattatttgcagcccttttacacgttaatatacacttgtattacatgctgaaaactttattatattaggtatttataccaactaaacatgccattatcatttagatatataacacttcaaagtttagaagtatacaataacaaatctttcccagcttccagctacataactagtaactgttaattctctaccaccatttgctgatatatatctaccattacttagtgcttgtaatacatatatcctattgtctccaccattatataagataaacttttcccatgcaccaattgatgtacgatctgctactattctaccatttgaatcaaacgaaacatacttttacgtatgtttaacctacagccctaaaatttctacaatctgacgagctttattattatcaatataataatgcatctctaatccttttctttctgcacggattacaattccttttaactttgctaaatgttgtgaaacagtggattgtggaagtttcaatatttctgttaactgtgtaacattgcacattttataatgcattagctcacttataatttttaatcgaaccggatgcgccattacccttattacatctacatcttcttcgcttattttagctaggtcattattagatattactgttaacatttctcattctcctttattattaatttctattttcctattatccttataagtaatacttatagataattacaatttttcctgttgagaaaatatattctactcaatacaaaaagacacctattcaaaaaacagtttttaccgttccaatgaattggtgtcttgaaattttttagccacactttatttattcatattttaatctatatatgattttgaatgctgcttaatatacgttgcaaagcaaaaggaatatttccatccctttttaaacataatcataaaataagttatataaataatttgttatatttccatgtaccctagctgatataatgtataaggaaattattgattaattaatggttaacatatattagggaggtacataagtcatgatagaggtaatcgcgtcactatttttagtagtcgtatattttattagttatctcttttcaacaggagaagataagaaaaaagcaaaagctgaattaaaagaaattgttaatggtactcatggaaaaatattggtaggatttcttggaggtgcggcagttacaggaatatttgtagtcatttggatcttatcagagtaaacctttcagacattttagcttatataacgtataatgcagttattggttaattaagaagaaaagcattagagaaaacaagatatgaaataatatataaggatctcgccttttctgttgaatggtgagttttttaatgtacaaaaaaaagacaccctaaggtgtcttcctccgacttgaaccactttaattttatataaatatacacgtattacccctttgttatacgtgtaaacacatcctataaaacagaatcttctatttacaccagattgttagttcacaaaatatcaagagatttgagatcaatatgttacgtctttcaaaagaatctgctttatagaatgtatccacaatttatattttactacatgtaatatttatatagtatatttttgcgaatatgtataattgcataaagtttacgagaaaaagagagtataatttgatattgtgtaatgaagataaaacccacctacggaaataggtgggttattttatattggtgagcttgtataagtatgatagaataagaacaactatatattgtagggtggttggttgcgatcctttctcttatttatagggaaaggaggtgaccgaatggacattctttttcaaatattattagaagtatccaaaactattgtctgagagatcgcagtttttggatttaaaaaagttacttctaaaaaacagaagaagaccacccctaagccagcaaagcgtgggcggtcttctaaaaaacgcaaaaattaatttttaataaccgatcaccttacggtagcagttacttgaagagatgttgacgcatctcttcttttattatatacgtacagcaacattgaaatacctttaaggaaattataacaaatgtaaaaaaaaaagaaaagcccactggtaccagtggggtattgtttgggtactactatctcattgcacaaaagggcctttgcattaaaataatatcatattcttaaagttgttatattgagaattgaactacccccactttcacttcgtttagaagtgagggattcctaagtaaagagttctatcgaactctaattgattaggctaaccccgcagtccttgcggttagaagccttatcgcttcattctttagattgatacttgcgttaatatccctatcatggtgtgtacgacaagaaggattcatttcaattaatggaaaaccgtagagtttctatccttaagttgatgggcatgtggcggtacccctataacattattaacttcatttaggagtaccgccccatacccatcaacctaataaaacagtatcctcctaaaataaaaaaccactaaatttatttgttacttccaaagaaagatattcatgaataatttaaaacacccgaataaaaaaaacaccagctaccataaccagtaaacctaaaatttgtataagcttaactcgattttttgaagaattaagcaatccaaattgttctactatcaagctaccaatgatttgaccgaataaggtaaagattacagtttgtccatttccaatttggtcaactagatatacatttattagaacataagacccgcctaatatccctccaagccatatccaccatggagctgattgcttaattggttctttaatatttgtgtaagaacggtccattatcccgactattataattagggtaatagtacctacaaagaatgaaacaagagctgcttgtgaggaggaataaagaacccttcctaattgaccattgatagcaatttgtatagccagtaacattccagccattataccaaccaatcgccaaatccattgatttaccatgttttttttatttgttttagaaaattgtttctcatgatttttgtcttgtatagctaaaaaggcacctgttaagactagtaacacgccggaaattcggctccatccaaatggatacggtattgaattaaaccaaccgtaattatctattaacatactcatcaaagtcattcccaaaattggcattatcgatgtttgcacactacctaatctagggaacaaaagaatattagcggttaaagcaattgccccaccaatccctcccaaccatataaaaataggttggttcaaaaataagtctagtggaatccctaatggtgaaccactaattaatattgtaatagttaagaagattactcctataacaaatgagatcattgaagctaaaaaaggagaaatcacaaattttcttaattgagaattgatggctgtttgtaaagcgaaaacagcaccaaaacttatagctaaaagtatggaaaacatagaaatttacacctcattattattaaatagaaacccagtctctcctactgaagtattctctgtctaaaaaatataaattaaaaacgacggcagtgattatgtcaaagacgtcgtcagatataatacatataataagttcagggttaattataaaaaaatatgattttttatttcaagaagctctgccgttattattttttatgatcctttatccactgtaaccagtaagaaaactcacatgctaaatgcatttgatgcgatttaataaggctattaggacaaagtgcaggaaactcaacaactagacttacttctatcccagtatcagtatctttaaattgatgtcgaactccaccgataatagttccatctttcatacgtgctacacctgttgattggtattgataagacttatctctcggtgtttgcaacctagtttcgtcaccaaaaacaataaagaattgaactggaaacggagaattaccagtagtttctataacttctaattcattttctccaaaaggtcttaatacatagtgatcaggacaagctgataaattcacttgatcattctcacgtgactgttcaagcataaaactatcaattccatttatcgcttcttctgctgtaattccatctaaataaatacttgtttttgaaaatttccgtctatcaccagataaagctgtaccaatacgcatgcccatctcgctcaatctaagtttaaatctcaacttatcgtacatttcattgtatgaatatcttaactttaattccgttagtttttttatcatgtcatttgtatcatgtattttaggctctttatgtcctaatgtattgaaaactttcttaatacgttcttttttccattttgtgagttcttctggtgaaatatttttcccctcaatataaattttcatattaattctcctttgctcttcatcaagtattattccaacgattgtttttactcttattgttagtcaatttattgaatataacctaagtatttcttttaaacatatctgaaaataaaattcccatgatgttattttaaattttttcttctttttgttcgtattttagagtggttaagattagattaatcgtctcttttttcgtatttagagttagatctatctctgaatgggcaatactactaagaccatataaaataaatccagaagttaaagataagttgtccgtatggaatactcctatttttactccatcctcaataacttgttcaatgagtggccgtaattgcataaataatttttgctcaagcaggtaatgttgttctgtatgaaatgaactggcatctttgtagggagccaatttttcaacaaatgtccaaaatatatccagagcatttttcattttttgtataacgggtaattcattcaaagtaagtatttgttgaattttttctatattttttgcgataaaatcgtttaaaagttcatcaacaaaattatctttggatttaaagtaataataaaataaacctgttgctacacctgcatgattaacaacatcctttatgctaaagcctcctataccgttttttatataaagttcaaaaccaatatccattaactcttgacgcctaatgtcaggttcttttgatattcttttcataattcatctcctatattatttttccgcgactgaatcgagttcaatcatacacgactgaacttaattcagtcaagttcgattactttaaattaaaaattctatacgcaaataaaaataagcgctgttccatttttgtaggaaagcgcaagattgaagtataggagtatttatttcttgtgatattcgttctatataatttccataatcttctttgatttaaactacttttctttttattttaagtatagattgcaactctctactctttgtaatagacaagctgactggttgtagttaacaattttccttcaggactccacaattccgcggtctggtcaaagaatccattgtagaattgaagcgcgcgagcatggcctaacacctctttatcaccatgtttagtaagcacttctgaattgatatgaaaataaacggtaagtgaaacagtgccaacaggaaccatttgtttgcgccgcacgtaaatacgcgggaaaaacgcatcacacatcgctgtaagtgataagaaatcgatgggtctccgcggttcatcctggatccattggagtgtgacagaatcggaagtattttttggatttggttgtgataatgcgagtggtgtcccttgtataatcctcatgtcgtagttgtatacccaaggtggcagcccttcagatgaaaaattcttaacttcttttgcggatggtacatttggaaaattcctttctgtagaagaccaagtttttcgccggcttgcaaaaactgcagtacccgtgataataatacctttatcttgacagagttcaatataccaatgttgtgtggatcgattcgttctagtcggtattgccttgatgctgaaattgccgtccaaaaccggcgctgtataattaatagttagagatactggatcgccttttcgttccggatgctccattacggctctaagaagagtggccgcaataataccgccaaatggcccaaccatattggcataacattcagaggtgcacccgtaataaatcccagattccccagtcaactgcgttgctgtatcaaatggatgattttgtttattataattcataatagagtcccccttgttttcaatgcaatatcagtatcattttgttgataccaaattcccacaatagttgtgatattctcctcgaagcctaattccacattttacaactgaatctaattcaatcttacttgactgaataaaattcagtcaagtaagataaaaccgttcataaatcttaaaacaatcagacacatttgcagaagggcagaattaatccaatttaaataaaaacttaacattttgtttctcaaattatgttgtttcttttaccacacaaagatttgaagtagtagacctcctttcattttcagacattttaatactttcaaagaatatcggattgaattttcagtttaatttagttgtaatgaaaatgagttgaatatttagtctgttatcgaattccttacatacaaaaagattgggttatcccaatctttttgtatgtaaacgaagcattatacaattaaactcctgattttaaattacatttgtgttatccttgcaattcgatttaaaactataatattataaagaagattgagtctagaccactcaacttctgatagtaatagctcatttgccatcagaataccctagcgaaagaatcctgctttttgtagggttcttttattgttccttcaatatgaaatgtaatatagtataagccattctgcgtgatgaacatcctctttttagcgctaaacggtgtaatcgtttctcttggaattttgacaattttatttctacaaaatgttgaaaagcctggtactgacgtactggaatgtcttccatataaatgtaatccaatccctctaccaccaactccgatgcaatatgatccatcttctcatcgtaaagaaccaatccctgtagtttttcatacaaatctggttctaaggaaattagtaacttattagtattcttccgcagtacctttttttgcgctttccaataggcttgttcttgtaaatgtgcatgcatcatgttaaatccctcactttatcaatttatttaacaatctacttctcccctaaattaccgatttactttacccattatttctcactgtatcgatagccgctagacaggatgcaatgccaagacgagcttcactatatatttttttgttgaccgtcaaataccaacatcccttttctttcaccgtaaacaagtcatcatactgtcttcctagcttctctagaatggccgttgactcttcaactggattgaaatatttaatcggcattcttataaatggtgtattgttcttgccccaatatccaccgcatttttccaatcctaaaaactcctttgcaattacatgatctaaccgttctgttacgattgataaatcatgatatgggatccaccaattagacgaactcattgctacaaactcttttgtaatcccgttatataaaattcggcatatactaatcccttcgaaatcgttttgtgttacaacaaaatcagattgttttaatggatttccatgtttatctgttgttcctatttcaaactcttcaccttttaataattgaaccgacttcatcattttaaattcccctttttataatttctattttttaaaaaccgtacataactcctgataaaacatatgtgaaaaggatcatagaaatagatactccaaagaatccatagaaccaaatttgatccgagaaattttcttcaataccaaaatagatgtttaactttttgtaattttccgaaattaatggacgtatttttttgaaggatttagttttttggtgaggttgtgttaaaatagactcaccagacgtgattttaataaagggttgtttcatgacaaccatcctttctaaaattatgtttgtatacaagaggaaggtgtttttccaggctgccaggcgcggaaacatctttctcttttatttttactccttatttttcggttcaccaaaccactcatgcattgcatcaattgatacaagccaagttttctgatctcgtttatagatgcgatttggatcacgaggtggttcaaaatatttaattaaaccacgcttaatcatactgttaatctgttcttcctttactaaagatggtttcaccttattcttcactgtttcataggggatcccccaccgtatagctgcttcctgaagaaacatgtatttatcgatttccttcatgaacaattccctttctaatgatgtaaataatttttctttttgttaatgtttaagaataaaaaggccccttaatttatggaatgttcatcactttttattttttccatgctcgtgggctgcacttacgatactcatgatgttattaatagagctttgctcgaaccctgataaccataaaattgttcgcagttcgttttttgtcaactgacgactgatgtgttcttgtaagaattccacaaacggcctatattgattcagttgccattcttccattacttcccctaaatccgattcaatccattcggcacgaccttggttattagtacctttatagttcaaattcattaacaaaacctcctcgtatgataaagttaggttttttaggaaagggatttacctataaacccgtgaattctcccgattggactttcaccaactagataatgtgtccttatctggacacgccgatttgccaacgcaaagaataccagtcatgtacctgtcccatcgggacaatatctgtaggggtgtttgtcatatatacattgataccactgagtcgtttactacgaggagaatacttcattcctttctttttttctcttacagcttgatcttgtaatcgtttttgttgctgttgttttgttaatcgatgaacaattacacgagctggcactttatcaatcattcctacataagcatcagctatttcacatgtttgtcctggttgaagggagttcattaacgtctccatatctatctgtatatactctgtacctttcttaattcttccgtcttggaaataatcagggttaggatttttttgataaatacgtgtattcaacttgatacgagagatatagtaggcctctttatcttgtatatattgaaggtcttttaaatgaaaataacctaaatctcggatacataaatcatttgctgtcacagttggggcacacagagagccgtaagtgcgatcatgttgtttacctggacctgtatgaatatgtaggaactgtccacttaacaaatcatactcaagttgaatttttatcccagcagtatggctgcaccctcctgcacctggataaacagatgaaaatacatccgggagttgaaatgcagttgaatctaaaatacgaatacgcttgaaaacagaagtgtatggagaagaaatcggcatagatgcggccaattttttgcttagtagttcggctagtaggtgttgtaaaagttggacagcagccttattaaatcgttgattcagtccctcaggactgataagtacttctgttgatgcttctaaacagctagataactgagttaaagaagtcatagctacattttggttcacccatacacataaagctactaaatcttttgcttgatacttactggttcgttgtacaaaaccaacatctctagcaagatctcgtaaggtatttggagataaaaaactttgaatctcttgggcaaatagttgtaattcgtcagacacagaaacagacataaaaacgccatcctttcctatgattctacagaaagaatagcgtattttttcattttagagaaattttatattgtcggcttaatagtaacgtgatgctacctcatcgccatcaacttaagaaaacaaatcaaccccaaaacgaaaattttatatctttgcagatatatttgaggtttaagctcatttttctattttgtgggttaataaattacttaacttgatggcgatgtgacgttctccctactaaatctcttttaaccttattttgagtctgcacaaagtattaaatccattcaacttaagtagatataataatattgataaactttaagttaaaagagacacccgctaatttaagggttttcaaaaatttagttagtttaatgttgcttctattagtaaatattctctttctttactatctacttgctgttcaattgaattgatcttataagaagatccatgagctattaacaattcactttcaggtaatttcgctagatttcctaagtatgctgcatgttttccctttggaattgttaagtgaataagaatcggcagtttaggaaaatttcctgttgtctggttaactaatgaggtgctcatatatgctttttccgattgttctgtatgattaaacgcttctttaaattttttcaccttttttacctttttcaagaaatgcatcttctgagactcgtctataaacatttactgcttcgggagttgttacttttgcaagcgctcgatctatgtactgaatttctttatcaaactctttatttgcaggttttcgatcatttctaaggtgtgtattaatcttcgtataatcattacctgtatatctttttattgcttctctttcattttttctttctagtttactttctttactttctttgtcatctgtatcatcttttagcaaatcatctatccacttcttataatgtttcgctccccattctttggctgcatctttatttttcttcgtatcatacccgaaatctataggttgtgtagcattgatcatattaaattggtgtattttccctttttccatttgaataggttgatttgtaatgctattactcttttccgtcatagcaaatgtagacgtaacaccaccgaatacagataaacctaaagatagggtgatagctgtagctaagctttgttttttcattttaacactccttaaaatttatttacattacaaacgtactccttttttgtaaatttcggaatgttattaaatgtttttcaatagacgtctgaccttatatgtttttataacatagggataatttatatataatgattgaagactgaagtaatcgatagctccaaaatttaacttaaataataaggaatattcacgagaattaaagtcattattcgttaatttttttgatatttatacaaaataattacatattgattgggagtgatggtagatatacataatttctcgaaactaattaaaggaataattttatgtatatgaaaaactattagtagataataatttctatatatgattcttaggtacagagaacctaagatgaaaaaataatagaacacaaaaaaagatgttcaacattagtctaattttatatttttcactatttttatagaggaatcttaacaagggaatatttccatgaactatccttgaaataaaatggatacagcactaaatattaaataaaaaaatacttataccttataggggtcaccatacattgaactgcaccccaaaatgaaaattttctttctctacagttagtaactttgagaagtcagctctttttttcgttttggaggtgattacttttcttaagttgatggatgtgtggtgctaccccttcagtatattcttttgggtcaccattatctccacatgctacaggtactgtaaatgagaaagctcttactatcattaacgtacttgttatgtacaaatttattcctcattttacccctaaaaaataggacatggtctgtatttcatctccatttagatagaaggaagaccgttttttttgttttggggtattttttaaacttaatagcaatacgttagtaccttcttgtagcacaagggttgtaataactaacagaaaattaccaatcattagaaaattttatatcaatttactttatattccatttatgtaaaaataattgtgagtacattttttaaaactttcccctaataaagttttgaaaaagttgtctcaacattccctatgttgtaattatgccaaggaaagagagcctatatggttctcttttcttataaaattgaatttttcaacttcatatttaagtagtataagacactattaaggataccattgctgtattgaacaacaagggtagataaaaccaatagtattgttttcgcctttttcataaatgattattagaaatactatataagaaaagggataaataagtatatttatccagaaaataaaaaagtagccaacaaaagttaattgccctgtgaataagaagaacatcaatagaagatgaaagtttgcccgaattatgtctaagcttacaatttacttttttaatattgtgagacttcttatataaaaacaagccataaaataacttgatttgattttattacacttgattatatttttatttagtgtatcattaaattatatggttaaattttctataaatggaaggtggtatataatgttgactgaattacaaaaaaattttttctcacggttacagatacctccgaaagaagaggtaagatttgaaaatttacatgaaattcttcagcaaatggcatatgtaataccttatgaaaatttagacgtgatggacaaaaatatccgaagaattactagaatgaacgttcaagaaaaattactattaaatcagcgcggagggctatgttacgagcttaatacactattatattattttttacatgattgtggatttgatgtttatcgcatatctggtacagtttacgatttaggtggtgataagtggaaacctgacgatggacatgtgattattattttaaattataataatcagaaatatattatagatgggggacttgcctcacatcttccattacgcccagttccatttagcggtgaagtaatttcatctcaaacaggaaaatatcgtattcgtaaacaaaatacggagaaaggaactcacctattagaaatgaaaaaaggagataatggggagagtgcccaattccttaattctgaacctactaatgcatggtgcactgggtttgcgttttcattagatgaaatagatacaaacaaagtaaatgctatacaaaatattattgtagagcaccccgaatcaccttttaataaaggatacattatctgtaaattaattgaagatggacatatttcacttactaaaaaaagttttacagaaacacgaaaatgtcaaaaaagtaaacgaactataaatgaaaaagaatatcaacagatccttaaagaagtattcaatatttctctaaataaataccctgataaaattttagaaagaggctagctaacactaactcttataaaatttctttgtcgtttaaaatagatttgtttaaataaaattacatttttatacctttatataatttcaattgagatagttagtatactttatctacaatatattttaagagtgaaaaagcatgattttttatgcaatattagaaaaagcactcgaaagagtgctttttgttcataaaatataaattaatatagctataaaagtaaatgatttgtattttatttttaatagaataatttcaaataattatgtattttaaggagtgttaatcttgagaagaacaacagaatacatattagggcttaccggtggaattatgggtatcttattttccatttatgctatgtttattgataatctaagtaagactcttaaagtagaaggtataaatgtaataataggcttaaattggctccctattacattatctgttattggaattattggttgtttaattgttacatttaaagctaaaattggtgggattttaatgattatatccgctattggtggttttatttgtatctcattttttaatttattaccaggtactttattattaattagtggattaatgagtctttttcgtaaagaaaagccaaatttaactgtaatatagaataatttatggataaaaaaacaactcaaactgtaaagtcaattcaatcacaaacagcattaaatgtggaaatattgaatcaatctaacaaaatataataaaaaatagaagctttatcgaaattaatttcaaaatttattattaagaaaaaaggaaaagagaattaataaatatcaaatatgatgatatttattaataaaaaagactagtgttgatcttacccctgtcaagtaaacggtatgaaaaagaataaacagccatcgagattcgatattctatcagagctcgatggttgagtcgtttttggaaccgtttatagttataaaagtaaatatactctttaattgcttgtattaaatcttcttctgttttaaaatgattcaaatacaacatctccgatttaaaatgggagaaaaatgactcgatgcaagcgttattatagcagtttcctttgcgagtgtggctaccaatgatacctaaatcggaaagtcgtttgttgtaggcatgagatgtgtactggaatccctgatctgaatggagaatggttccacacatatctttttttgtgccaacatttcaatcgtatctaatacaagttcattatcattgcgccttgataatactcgttgtgccgttgttaattggtctaacatgttacgatagaacttagggtaattggctttctcatcctcagaactaacgtataatccatccatcgcaaagtctaatccaacaactgtttctacttctttttgtacaatttctttttcatattcagtcaagatggatacataatatttcccagtgggtgtcatagaaatcgtacatgacttgaccctatagtcttgtggtatctctctatgttgtttgatatgtaccattttcagttttggcaatttgatatgactatgaagcaacataatatttccgtttactacattcgttgtataagactttctgtctttttctgatttatgttctcttttcgtagttcaactacttatagagaaacgtgtcgcaccatgtccccattcatgacacaatgccccgactccattatcacgagttaaattaatgactttggtagaaggttcataatgtgctaatgtattgccgcttcctctcgcaccaattgccagccctaagcgtcctcctagccctatatactcaggtggaatccccaatatacgggctacatcatgtaacgcctcagatacatgctcaatatgttcttttgcatattgttcggtgcaataatgtccaaattgcattcccttcaatccaaacatagtaactacgtcttcaggtttggtagcaaattctatttctggtccttttctttggagggtatctggcagtttcctactccaagcagctgtggatttcttacgagtcgtaacctttttcgtaagtaaatcattccatgttagttcatgtgatacacgaaggtatgtagaattaatactttttgaatttgtacaaagtgatatgaatttctttcctaatattaataactccataccatctgcatcaacaaattcatcaaaatattcttctaccattcttttaaatgtgtatgtgacattcttatcttttttaaatgcataccaaccgttttgcatttccttaccgtaagaaccaacaagatctatccattgttctgaggtatgtattaactgtatatcatgccaaactcttctacatgcttgcacatacagtttccttgcagtcggtgtatctacaattggcttcttatcaatcctgcccactagcagttgctttaattttgcaacacgtggcgggacatcattttctttttcatgttcaaaagagaatggaattaatgcgtttcgatccaatgtattgagcgcttctactggagattctttttcaatttctgctaaaacttctaaagaaaatgatactaaaaatgattcttttaaggctcttagctctttcttagctcctactaatttctcaccaacatcatagctgtattgattgcgaacttgtttatctgtcctcacatcttgtactattatgttttctcttacctctaaatcgaacagttcaaataaattcatgctaaaatcctcctttataaaataaaaagacagaaattcatagtcgtttttcactacggatttctgtcattccctctgtctgtagacttccatatagttatgtaaatcactcattacgatacactcacacctgttaaagagaaaagatcctcttttgtcggatttagtgcttgtaaccagctatctacctccagaaagtttactttttttaattgttcgcctttttccgcacgcttaaccacctctaaacctccatgctgatgcacaatcattacaagatcatctttcttgaaaatacaatctacatctgcagaatttatgtggtggttacgtagaatcggtttccattttttaagtgaataaccttctacatctaaaaaaccacggatagcagtaaagcgaaaactcgtccctctaaaacatctttccaataaaaaaaggaaatcccgtacacatccattaaaatgaacatgatacaaatagatttcccctgcttgtttggctgctcgctgtgacaagtttgatggtttaatggaaaactgataacaatctcgttcccaaaatgctccttcctttgtaaccctcattcgtaatgcacgtaaatttggcataaaatcatctggatgtgcagaacaaaatatagatacttcataactcattttcatttgaatttccccctggttatatatttattatttttctacttcacaacaattgattactttacacgtagaatagataactcaaaaatatgaagaaaaagtaatactcgataaagccacggcaaatgtttttctccatgatacatgtaaagttctttcgtttcccttctataagcaaattgaacacctaagtgtgtaggaagttttgatatgtcctccatttcaacgttttgaataatctcaataacggtatgggaggactcctttaataatttctttaatggctcaagaggaatattaaataatctactacactccttagttcgctctttgttatatttaataattctggccaattcttctacagtcggatcaaataaaggatttgtaacctctacatactcagacataactttttctaatgtacaatccatcttgttaataatataaagaccccactccttaaacatatcttctaacgtacatggatagccatacacctctaaacagtacttcctttcaaatggaaaataacaatcttcttcacaatcatggcgtaaaattggtaaaaaaatcgtattgtaatactcatcagagttgatgtgtaaggctgtcattttatctgcaatatagtcttctgtatcacggaaaatgctagaattacgctctcgaattggttgagtaacttcattcctctgaaagatttttattatctcctctagtgatagtaatggtttatctagtgtaattgcatgttcgtatttcattataatgatccccttccaaagcaaaaaaaacacaaatcttgtgttttttctcacagtgttttttatttgtatacctaaatctaaatacctttttacaagtgattcctaacttgaaaacaacacaaaaagggctccttcaagtcgattaaaaatgtgcatagcaaaataagctagatatacactaatcggctcaaagaagccctttcaaaaatgaaacaagacgcaacttgcttctacaactcaaccacaacacaataaggtgtgggaataaacggaatcaattaaacattaaatatatatttatattaatcaattcgtatctaaatttcaataactttatgttttatcacaaaaatgaacttatttattttagtttttttcgaaaattatgtataataaaattaccctacacgagatattgagtcatatctcattcgtcatttaataaggcctatataaaaaataaggccttattttttattcttcctttatttactattaactaaatccaattcgtgttacaatcagaacaaacacacgttctttagaggaggattttcatgtttaaaatgttcaaaaaggacccaaaaaatgaagaaacagctattttggtaactaaagattcatttgatattttcttatttcctactagccatgaggagcaataccatttagtaatagaaaacttccacgtaggttacaatcactttttactattcgttgatagaaaaaatcatgcattgcacatttatgatgacctttatactattgttggcggaacaagtgctattaacctaattagcgaatatctaattgaaaaactgtacgaattattgcatttaaaagactataaaaatgcaaaagtactaatttacttccctgagaatcataaagattccggtttagtatcttatggttaccaatcaaaaaaggatgattttgatttcggacttgatatcagtgaaataactaaacatgaagcatatttagaactagctaaaaaaaatgcatagttcattgagctgtataaattaataaaaagacaaaagttatgtacttttgtctttttattttaacgcaatccattcgtagctttcccactcttttggtttcttatcatatttgatacgaccagtcgtacagaatgatgcaatcatccattgtatgagattcatttttgcatacggatcaacacaatcctctaattttttcaattgataacctgtactatttttctgccaaattgtatataaacgaaagtgtgttgtcgtaacaagtctagcttttgttgtaacttgccattttgcaattttcgttaaatcctctttgacttttctatcatactcttgttttatgactttataactcttatctttattaattaatccattagagaatccaaaaggcatttgatgcacctcataaacagctccttcttcatctcctaaaatatttgattctactagaaatatattttttagttttaattgttccgttaattcttttccgctccgataaaatggcttctttatcttctgcaacaagataacctgcacaattaatccgataagtaacggatacgctaatacaaacaccatatgaataaacatatttgcaataagcacccctactagtacgaatatcgtgaaataaatatatgtttctctttgatgaataattctactattcaagctaacatacctccgttttgatagatagtgaacgaaatatacaccattgcccctagtaaaatagaacaagccccaggaaagctctgtatcagctgtatttctttctttggtagttttgccccaaatatagaagcagcatgctccaattggtctttaatcgctcccacaaaccctaaaattttaattaatcgatacacactagcaatccaaaagaatagcaaatggaaagctgttaatgtaatggcagtaagcatagccgattcttctactacattgctaatatataaagctaccaccacaagcatcttggtatcaccaggtgaagagaatttaaatgtctctagcaataaaccacacgctaaggccatgactagtacaattgcaatctctttccctgttcttattccggcaaggtacgtaattcctatccctactattaagaatagtagatgccacatattctttgtttttctatatttcaaatcagtaaatacatttaggaacatgtaacttagtaataatcccacaatatacagacccattttctttactcccctcttaatttcataaaaaatgctgtgtaaaaaagggaaccacttttagagtagccccctcgtttatttttacatttattttttattccaagaatcaatatctgcattgcttgatgcttttgtgaatcttgccaggatcgtatcatagccaccttggattgccttccatacaaatgggccaatgactaatacgataattaccgccagagcgattaacataccgttttctgatgataactgtgaatcctcattttttaaccaacttttcatctttgctaacatttcatttcgtctcctttatataccgattttaagaatctattaaaattagaacttatctatttaaatctttcattacttattccaagaatttacgtctgcattgcttgatgcttttgtgaatcttgccaggatcgtatcataaccaccttggattgctttccatacaaatgggccaattactaatacgataattaccgccagagcgattaacataccgttttctgatgatagttgcgaatcctcattttttaaccaatttttcatttttgataacatgattgaatctcccttttccatttatttgagctatacgtaataaacatcattaatctaaaacttctattacttgttccaagaattcacatctgcattgtttgatgcttttgtaaatcgagctagaattgtgtcatacccgccttgaatcgctttccatacaaacggcccaatgactaatacaataattaccgccaaagcgattagcataccgttttctgatgataactgtgaatcctcatttttcaaccaattcttcatttttgttaacatgtgtaatgctcctttacctattccatttttgataacatcttctataaacttgcaaatccttgcattaaggattgaataacaatcaccattggataaatcacaatacatccaataactgcgacgttaaatttattcatttccattggtttattttgaatgagacggttatagttctcatgttttaactcacgcatcattttaatctgtgcatccataatacgaagactctgtaccttgtccgttttttgcgcttgttgcaatgcaatcgtaaaggtatttacttctggactatttaaagcagcagcaaagtttcgaaatggttgatccgagccagcatacatttctaattccgcagtaagtgtagatacatacggacgaaggtgtctcccggcatatatctctgccttttttactgcttctaatgttgtatgtgtttttaacagctgcagcataggtattagatactctggtaattcgaacttcctagcttctatcgcctgcttgattcttccctttgataactaaaaattcttttgtttttcagttgacatactaccgcaggtcttatatactgcatgtttctattatacgataaaatagaaaaaaggcagaaaacgaagctcgtcttctgcctttttgtaatattattatttcgtttgttgtttattaatagacataatgaacagtccaacaatcccgcctactaatggaagcataatctctcctgctaaattaaagtaggagcttaagaataaaccatttacatcgattacccagccagtaacatacaataacatcatatatagtacgaaataaaactcgcgatttgaaatcgtttcatgttgtgcagttttcataatggacaccatccttttcttttataatggaatataaactgtcacattttgttcacatttcaattgtaaaactttccatcataaaagtctagtagtatgtgtcgaattttgaacggaaataaagcgttatcattatatcttataagtacgtaataagagatgtatattcacgaatgtagtatagtataaacatagaatgatagtgaagagaggggcaaagacaatgacagtttatgatttttcagctaaaacaattaccggtgaagaaaaatcgttaaaagattacgaaggaaaagcacttcttattgtaaatgtagctagtaaatgtggtttcacaccgcaatataaaggattacaagaggtgtatgataaatataaagaccaaggacttgaaatactcggattcccttgtaaccaattcggaggacaagaaccaggtacagaagcggatattactagtttttgtgaattaaactacggtgtaaacttcccaatgtttgcaaaggttgatgtgaaaggtgataaggctcatcctttatatacatacatgacagaacaagcaccaggtttactcggtatgaaagcagtgaaatggaattttacgaagtttttaatcggaaaagacgggaaagtagtagggcgttttgcgccgcagacgaagccggtagatttagaggttgagattgagaaggtacttggagaataattaggagtttcactttattaaaaaacgtctcaaagaacaatgtagttctttgagacgttttctttaaactcacattttcaagattaaattactgtatcaaagtcatctgatttaggtagagaagctgcttttttcataagcacttcccataagtgtacggttttcttccattctgctgcaacctgcccctgtttatacatagcattctcataactggcagtaagttgttgcatatcggccgagttgtaaagtgtatcgatatggagagcgtattctcggaatgtttgactttcaccccgtggcatgccaattctcgcaaattgttttaaaagtgcaccgtaagctttttgataaacagcatcatcttttcggtatttatagaaatgaataataagaaatgtcctccatatcattctagtggtgaagagaatgtatcccataatactaattagtatcgtagagaggaatacgtaccaccaagaaaaactagtttgagaatttgtgacctttttagtagaagcttcttctgtattttctattaaacttttaagttttgcttcattatttcgttgttgtatttgcgtgttattagaattatttgcttcgctattttgtgaaataggagcaggcgtattatttataaaattatagggattagtaaatccttttgttggttcgaatggaatccatccgtatcctgggaaatatacttcggcccaagagtgtgcgttatcgttcgtgattgtataaacattctcaccttctgcagaggcaagtgtattgtcaagagttccttctgtatagccttttacccagcgagcaggaatcccggcagaacgaagtagtacaatcatagacgtcgaaaaattattacagtagccgctttttgtatcgaaaaggaattgatctacataatcttggcttttggcagggaataagacattcgttgattcgtatgtaaaagagttgtctgtaaagtaattttcaatagctaatactttatcatatcggttgtctttatcatttgtaagattgacagccaagtcttttacgcgctgtggtaatgacttgggaagttgtgtgtactttgtcataaaataaggatttgtttcttgaccttcatttgtttttacagctttcaagttttctatggaaaactcagggatctcatatgttactttatacgaatgtaaagtagtagaagagtctccattcattgtataaattttttctgaaaacgggtcaacactgtatgatacatcagaagcagcctcaactgatactaatcctgctggataggtaagatgagggtaacttttttgcatggtaattgttgcctcagtcgttttcatttttgtattttgttcgtaccagcttacgacgtcgtttttatttttaaaagaaatctttttcggattttcagaaatttcccagccttttcctgtataaaaatcttttgtttctactctccaatattgtttgttttgcgttcgtgctgtgaaaacaattgtaggatccgccttaaaaggaccgcctaatcgcgagtcatctaaaccatacccaattgtagaaactttttgctctttacttgcttcagatgtgttgaattttaaaaaatccattgggtttggccattgagggccaaattttggagcaaagtatgcaatggttgctaataatacgataaatattgtaagtggtctaagtaattttgagatttctctagcataattttgtaagtgttcacgttcttttattcgttctacttgaagaagactaagcataaaaaagccgatgacaacagtacgaataatagcgtagtttgcattgtataaatgtaagttatgaaaagttgcgatataaataatagtcaatacaaggaatagaaacccacgttttttatgaataatccaaaatgaagtgaaagaactcaaaaaccaaaatgagagaaaaaataaaaccgtcggaaaaactggagaaatatctagtaaattcccttggaaaaacagggaggaatttcgaaacatattagaaaagaatgttgttagccaagatggatttataaaagcatttttataatatagggaatgaatgataaataagactgtgacaatttttataggaatctgccacctcgtttgaaaaaaagagagagcgaagcaaattcctataaatgttacgaaaatatctaatctacctacatttgtaatgcctataagaggtcttagccattctagtaaaagaagaaatacacatgcatgcatgaagaatctgttcgtatcccacttgtattttgcttgtaatatcatcatttgctcacctcaaaaaacacgtttgtataccggttttcataaaccgtgtttacaaatatttgtcgtttttttagagtttctagtatactgagttctcggtgtgaaagttgattcgctttttctttcacgacaaaaaccatacattttctatttcttatagcagcacaatcagccgccttttgaatatcgggagaaagattactggtcacgagtataaccgtgacgggctcataaatttttcttagttccatgtctacactctgggagagcggaaatacactgtctgcttgtacttttgctaaatgacaaaggatttgttgtaactgcgtatctccattgtctaaagggaaaatagtttgttcttttccgatagacacgaatgatgctggtgaattttgtttcaagacagcccttacaatagaggcagtaaatgtgacgactgattcgaatagaggagactcgtttctgtctatgaatatcatgatattatggctgcgctgttgttcaaactcttttgtcataatattgtttgttcgtgcagttgctttccaatcaatccatgaaaagcgatcaccaggtttatagtctctgacaccgacagagattgtagagtcttttgctgaatttatatttgctgaaagcgctccttgttcgaaatgattttccaattgtcgatacgctatatctacatactggggatagactaaaaatgtatctggaactgaaaaagttgcttctttctctatcatgccgaataaatcgccggttttgacacgtacgcttgaaaaagtgtgctcgcctctagggattgtgtcaataacatattgaaacgaaatatttcgttccaatcctgggaagagtactaccttattcatctttatttgtttacaacttataaattgtggtggcagttcatcttctataactaaataaagtaagggaaaaggaaattttctttttattgtaatcgtgcttacaaattgttctcctactacatatccattctggtttgttattcgctttacttcagcgtcccgtaaagcgtagaaggggagtagtagcgaataaagagcaatgggaattatgctgtaaaataaaaaccaactgacaaaccctccttgaaacatagcgtacacaaatgttaagactaggcataaagggagtagcaataacttcataacgtgatatagtgctcgcagcattcgtttcatcaagggttcatcgccctttgagtaggcacggtagttcgtgcaacgatttttgcgataacttgttcgccagttattccttcaaattttgcttccatttttataatgagtctatgtgctaaaacgtaaggggctaaaagtttaacatcgtctggaataacataattcctgccatggataaatgcataagcttgtgaagctttcattaaagcaattgagccacgtggacttgcacctagctgtatagaactgtacgtacgagtctgattaacaagctttacaatgtaatgcttaattgctttgtccatacttactacccgtacgctttgttgtaaataaagtaattcttctattgtagtaatggtctgtaattgagagagtggatttgttttttccatccggtttaaaatttcaaattcttcctctggtgtaggatatcccatttttagtttcaataagaaacgatcgagttgagcttctggtagagaatatgttccttcatattcgaccggattttgtgtagccatgacaaagaacggctttggtaaaggccttgtaatgccatctattgtaatattgccttcttccatacattcaagtaaagcagattgtgtctttggagatgtacgattaatttcatcagcaagtacaaaattacccataattggtccaggcttgaactcaaattggagctctttcggattataaatagaaactcctgttacatctgacggcaataaatcaggtgtaaattgaattcgcttataatcagcatcaatggatttagaaagagcacgtactagcattgttttcccgacaccaggaacatcttctaataggacatgaccttcagctaagagagctgtcaaaactaagatggtttcttttcgttttccgaccattattttttcaatattattgattattttttctacagtgggatgtaatgaatcaagctggggcatcgtaatcctcctaatgttattatcgttttctaatctatttagtggacatatttctaattctatttgtagatagtaaaacttccacctttaattctgagaatattcagattatttattttgattatatctagtataattgtttccgtaactaagggcaatacagtaaataatgatttgtagttttatgtaaaatcagactcgatataaaataataacattgggaaaaatttttttacatacaatttatactcttttccttatagcagttttgaaataatatcaaaactctttttcttttgcaaaatagtcgatacctcaaaataccattctcctaataatcacgattaaccataaccttcacaacggaacaaaaggttttctcacaaacttattctctaataaatttttgacaatctcttgaactgtgcgaaatgtcacatctgtattttacaacctctcttatagtaagggtatgtaagagagacgtattaaagacctgcggtagtatgtcaactgaaaaacaaaagaatttttagttatcaaagggattttgtacatgcttaaacaagcgaaaatgtacatgtttatcttgacatttacagcctacgaatactttgcttgcaaacgttgttttatcaggctttttgttatattttcacctcattgaaatgcccagtaacggtattgtaaaataccgtctataattgataacctatcgtaatgtagttgaactataattaacctctttgttacgctaaaaggaattttcagtaaaaagagatgatgtgatattaaaaatttgtttcttattttttattcgtattgcaagcggttggattgttgtgcaaaacttcctattaaatccactcaccgttccccccactagatcaaacaggacagataattgcatatatcaaactttatacttaatataaaagacttcatctaatatacgcctataaggaacatgccatctgaataagcaaaataatatgcacatagtttatacagcacacttaaattcatttgagtgtgttttttgtctactttatgaacaaagcttttcttttaacactattatggaataattatacttttttacgttgacaatagtgttgaaggagaatatactaagcatgtaagttgattgtgaatagtttcacaaataatgtgaatttcttcacatataatagataggagttgtcattattatgagtacttggacacaaatttatgacccattaaacaatatttggttatctgcactaatcgcagcacttccaatcttttgtttcatcatttgtttaatgggattcaaaatgaaaagttacatggctggtctttatagtgtaattgtcgctattatccttgcaatatttgtttataaaatgccagcaacagtagctgtagcatctgccggattcggtgttttatctggattttatccaatttgtactatcgttatcgccgcaattttcctttacaaattaactgttaaaacagagcaattcaatattattcgcgatagtatttcaagcattacaaatgatcaacgtttacaagtattattaatcgcttattctttcggtgctttcttagaaggcgcagctggtctaggagttccagttgctattacagctgcactacttgtaggtatgggctttaatccattaaaagcagcaggtatttgtttagtagctaatattgctggtggtgctatgggtgctatgggtattccagttacagtaccagcacaattaactcaacttgacgcattaactattggtcgtcaaactgttcttattttacctttcattagtgttatcttacctttcttacttgtttcaatggtcgatggaattaaaggtattaaagaaacttggcaaggtattcttgtaagtggtgtttctttcgctattactcaattcgctgtaacttacttcttaggcgcagaacttactaatattttcgcagccgttgtaagtatgatctctcttgcattattcttacgtgtttggcaaccaaaatcttctactaaagaagaaaaacaagaaactaaagtatcacatacattcaatcaaattttatatgcttggtctccattcgtattcttaactgcatttgtaacaatctttaacttaaaaccgattaaagctttatttgctccagatggtgcgttagcaaacttagtatttaacattcagttccctggtcttcataatgctgttatgaaaactacaccaattacaaaagctgatacacctttcgcagctgttttcaaatttgatgtattctcttctacaactactgcgattgtactagcaattatcgtttcacttatcgtttaccgcgtaaaaggtaaaatggttaaagaattaatgattgaaacaatgaaagaattaaaagctccagtatatacaatttgtagcgttatcgcgttagcttacgtagagaactactctggtatgtcatctacacttggacttgcattctcttctactggtaatgcattcccaattctttctccaatcttaggatggattggcgtattcattacaggttcagtagtttcaagtggttctttattcgcaccacttcaagcagtaacagcagaccagttaaacatcgtcccttctacactcgttgccttaaacgtagtaggtggtacaatggcaaaaatggtttcaccacaatctgtagcagttgcttgtgccgcagttggactagttggtaaagaatctgctctatttaaaacagcaatgaaatacagtttaatcttcttagctgttattagcttacttcaattaaacgctgtatttaatatcttttaaaaataaaacaccgatccaaatggatcggtgtttttcacattacatttctttattttttaataaagaagctccagcaatttcagggtgagtcatttcgaatggatctaaaataatatccaattcctcttctgtcagtacaccatgctctaaacataactccctaacagattttcctgtttcaatcgcttcacgtgcaatacgagatgctgcttcataaccaatatgaggattaactgctgtaataattccaacacttttctcaacatattgcttcagcaattcttcatttgctgtaattccttcaatacaatattcacgaaatacacggaatccattattcataatactaatagattgaattaaattaaatacaagcacaggctccattacgtttaactctaattgtcccgcttctgatgctaggcaaattgtatgatcatttccaattacttggaatgcgacttggttaatcacttctgccataactggatttactttacctggcataatcgatgaacctggctgacgtgctggcaattgaatttcagccaacccaacacgtggcccagacgccataatacgaagatcgtttgcaattttagacatgttcatcatacatactttaagtgctgcagatacttctgtgtatgcatctgtattttgcgttgcatcaactaaatgctctgcaccaacaagtgggaacccactaaacgttcttaaatgttttaccacctgttcaatatacgtaggatttgcatttaatcctgtaccaacagctgtcgctcccatattcacttcatataaatgttgacgggactgtttaattctttttatatcgcgcgcaagcactcggctatacgcttcaaattcttgtccaaggcgaattggaactgcatcttgtaaatgtgtgcgtcccattttaataacgtgatcaaactcttttgcttttttaagaaaagcagaatgaagttcctccattgtaataagaagcttttctaacatcataagagttgcaatatgaattcctgtcggaaacgcatcgttcgttgattgggccatgttcacatgagtgtttgggctaattttcgcatacgcccctttttcatatcccatacgttctaacgctctattcgcaattacttcatttgtattcatattaatagaagttccggctccgccttgaatagggtctacgataaattgatcatgaaactttccatcaacaatttcttgcgctgcttctgcaatttcatgtccaatgtctttagctaagtaaccagtatctatattcgcaagcgccgccgcttttttcacaattgccattgctgtaatgagtgatggatgaatgcgatatcctgtaattgggaagttttctacggcacgtaatgtttgtacaccataataagctgcacttggtacttctttttcacctaaaaaatctttttctatacgtatatccttcgttgctatcatttttatcacctatactttttcattctaaatccttatccaaaaaatccgccctctaaaaacacgagtatcattcagaagaatttttcagtatccaccttcactatatagtaccttttttgaaagcgcaaacatttatttttctgtatatcctttttattaaagtttatagaaaatcattctcctactttccttatttccactcgtttaatttgatgcatatccttttcaaggactttaaaataaaaaccgtgtttctcaataatatctccttcagcaacgatttgtttttgtaccataatccagccaccaattgtatctacatcatcagcaattaaatgtatgccaagcaaatcatttacttcactaataagcacttttccctctacgattttatagccttcacttacatgctctataggtggattctcatcttcatcgtattcatctcgaatttctccaacaatttcttctaaaatatcttctagtgtaacaatccctgctgtaccaccatattcatcatacaatacagctaatggaatgtgttttctttgcatttgtaatagtaaatcatgaattggaatattttctagcacttcaataactggccttgtatatggcataatcgagcactcctcgtcccgactaccatccatataacgaataaataaatcttttacattaaccatcccaataatttcatctttatcttcaccaaatacaggatatctcgtgtacttttcttgcgcgattactttaatatgtgtttcaaatggttcgtcctcatataagcctacaacttccgtacgaggtaccataatttcttttgctactctattatcaaattcaaaaatattatttacatatttaaattccctttggttaatctctccgctctcatagctctcagataagattaaccttaattcttcttctgaatgagctacttcatgttcagaagctggatttaatccaaatagaccagttacaaccctcgctgaaccattcaaagcccaaataaacggatacataactcggtaaaaataaataagtggcttcgataacaataagctaacttgttctgctttttgtatagcaaatgtctttggagcaagttccccaatgacaacatgtaaaaatgtaattactgcaaaggcaataataaatgaaactgtactggaaattgcaggtgagaattgcaattttaaaaacaacggctcgagtaaatgtttaatggttggttcccctaaccacccgagccctaaagcagtaattgtaatacctagctgacaggccgataaatattcatctaaatttgtagttacctttttagcggccagtgcacctcgtcttttttcgctaacgagttgatcaatacgactgctacgtaccttaataattgcaaattcaacagccacaaaaaatgctgttaacccaataagaatgactaccatcaataattttaaaatatccacatatgctctttagctttcttagctaaagttacacctccttttaaaaagaagtttcactttagtttcttcaattattggaaagcaactctatataaaatccaccaattttcaaacctcatacaattctaaaggtaaaccatcagggtcttggaaaaagacgaatttcttccccgttatttcatcaatacggatcggttcggtctcaacaccacattgatttaaatgcttcacagcttcttctatatttgtaacagcaaatgctaaatgtctaagaccggctgcttctggaaaacttttgcgctcaggcggatttggaaatgaaaataattcgatttgatactcttctcctacacataaatctaatttataagaatctcgttcctttctatatacttcattcatttctttaaaccctaatattctagtataaaaatcctttgacgtctcataattcgaacaaataattgcaacgtgatgcactctacatatattcatactctctctattcctttctttaccaaagatgcatattctcccttgaaatgaaaaacatatatagcagaatatctcttttagggggcttaccacatgcccatcaacttaaggatagaaactctacggttttccattaattgaaatgaaatgatggcagagaggtcacacccgttcccataccgaacacggaagttaagctctctagcgccgatggtagttgggaccttgtccctgtgagagtaggacgtcgccaagcaactttaagacgagtcagaatgactcgtcttttttgtgttttataaaaataagaatggctggtaaatctcagtttattaaaatttcactttattgttcacatcaacaagttcaaaacgctcacagacgagtaacatatcttcagagaaattaagaccaagctcatttagttcctttgtaaaaaaacgaacatgggtgtctctccagtaattataagtacgatctccttcgccttcagcgatagcgaattcttcgcttacttcattcattggtgttacagttacttctattgtcttaataatagctacaggttcatcattactattgagtataatactataatcaatagtagtcggtagtgattcatgttctaattcataaaaaatgtgaccggagcatgtagcggttttaataccgtcaattactagttgtgcaagataattaggggcatccccaaattgccaagctgtaacagattctggttttttgttgtttccccaataagtatcccaatatgtctgtgctaattgattcatttttatcgttacctcactctaattcatatttagtctctttataattcctaggaaatttacttacttacttatttagtatgtctttgtactcatttaaaagttgtagcggtgtgttgcaaattaaaaagatactatgtggagtgaatatagtttgtaaatatgttctgtacatatatgggatctttaattttccaattgcattttatgataaaggatgtagttacttaaagaacgttcagattatgaatggtagtttattatcactatgccatattgaagtgagtaatactagagttaaaatagatgaaaaaactgatattctaaattgaatatcagtttaataatatgtgacttatatgaatctatagcaatacgaaaagcgtaaataagatagccaacaaaatacgatagtacgcaaaaggttttaaacctatcttctctaaaagctttagaaaagttactaccgctagcatcgctactataaaagaggtaatgaatcctaccgcaaacatagggatgtcatcgacacttaaatacttccaactttttagtaagtctaagcctgtagccccaatcattacaggaagagctattagaaaagagaattcagatgcagtcttataatttacttttgctaatagacctccagagatagtagagccagctctagagaagccagggtatactgctaagcactgaaataatccgattgttaaagcttggcggtatgttaaatcgtccagtgaataggctgctgcctccttcttttttacttctgcaaagagcataagaattgcacctgctacaagtccaatcacaacagtgtatggctggaataagtatgttttaataatatcatgtagtagcaaaccagcaaccactgccggaaatacgccaagaaatacatggaacgcgttgaattttttttctttctgtagaagtggcttaatattacataaagaaacgagacgtttatgatataaaattgcaatggctaaaattgcgcctagctgaataacaatttcaaacgttttcgctctttctccctcaaagcctaataaatgcccgactaatataagatggccagtagaggatataggtaaaaattcagctaatccttctacaataccgagtatgaaggcaataatgatatcgctcatagtttcactcctacaaattaatgaatgtctacttttttaaaatagaatagtgttgcaataaatccggaaattgtcgttactgcaatgatgatataagaatactctggtggatatgtcggttgtaattcgttatttgcgatatctagagtagcggtccacggaaataaatctttatgcttggagtttacgagcataagattagtcattgtaataatgactgttaatataatgggcggtacatagctcttcattacaagagttagtagcacaataggtgaagacaatagaaagagaagtccaccacatattaaaaattctaggaaagaacctaaaagtaaagaaatgttaaagccagggaagttccccaatagccctaatattaaagtaagtgcccaagcgactaaagttagcatcataatccaaagaaagagaatgatgaatttacttataataaagctaatgcgcgacacggggatagttagtaaatttttcagtgtatcttctgcatattcgcgggtaagcaaatatgcaaccactactccatataaggggaatcctataactaaagtagtatataagttaacgtcagtgaataattgatggaaccaaatagttggagtaggctgttttgtttttatatgtatataagaggctactacaactaagaaaggtgcgacaccagcaccaataatgctaattaaaaacatattagagcgttttagttttaagagttctgtatagagtagattaaccaattgttccacctccaactagtttggtgaaataatcttctagtctatcttcgcttatcatcatttttaatacttcaataccattaagaacaaacgttctgtttatgtatccttgttgtccaaaatgagagtaaatacgaatatttccttcatcatgtacttcataatcaaaaatttgaagatgattttctaataacatcacagctttatcgtcattattcacttgaaactctatgtacttacggtttgctttgcgcagcgtatcaagagaaacttcttctagtaactttccttcatgaataattccgatacgatcgaccaactgttctatctcggctaatatgtgactagaaatgagtattgttatatttctttcttgagctaaagaatgaataagttttcgcatttctttaataccaatagggtctagtccgttagttggttcatctaatatgagtagctcaggataatggagaagagcgcgtgcaattcctaagcgttgcttcattcctaaagaatactttcctactaacttttttgtctcatgctgcaagcctactatttctaatgcttcttcgatagcattctttttgtgaaccccaattatctttgcattaattagtaggttttcttttgcagttaagttttcataaaatcctggaacttcaactatagaaccaattctgcttaaaatatctttttgattttggaataagttctctccgaatatttcaatcgttccacttgtaggttttataagactaagcagcatacgaatggttgttgttttaccagcaccgttgcggcctatgaagccataaatctctccttgttgaacattaatatttaaattatctactgatttttgattgccatatactttagtaaggttagtcgtttttataattgtatttataggagacacctgctttctataagttcttacttacatcataaaaaggaaggcttaactgcatattaatcatttcttaactatttcttaaaagtattgtgttttggaatagaaaagccaaaagtagttcgtttccatggagtactttcaacccatatatgcccaccatttttttcaacgagtgctttagaaatagagagtccgagaccgctaccaccaaatgaagagtttcttgattgttcgcttcggtacattcgctcaaatatgttttgtaaatcatgttttggaataccagggccttgatcccaaatatgaagtttgtattctgcatcagcttctagcagttcgactcctattgttttcccatcctttccgtaataaattgcatttttcattaaattaccgataatccgcataatgcttagatgatctgcgatgataggacaagtagaatctggtatgagaatttgcagttcgatgttatgttttgagagctcaggtaaaaattcaatcaaaacttctctagtaacttcagaaaagtcgagttcttcttcttttagtggaaattcattagcgtctagcttcgccatattgaatatttcatcaactaggtgctttaagttatttgatttcatatagagtattttaagatattcttgtttttctatttcagaagcagcaactccgtctttcaaagcatctatatatccgattatggaggtgagtggtgttcgtatatcgtgggagatactagacaaaagttgttttctggattcctcggatcttttggcttcaatctgaacctgctctaatttagctattagctcgtttattgaaaaaacgatattatgtaatgagtggtcattgcttgtgaataatctcgtttgtaagtttccttttagtacacgacttaatttagtatccattgctttacgatgttgaatgaattgtattcttgaaaagaagagataaattgtaattaagataaggataataaataaagacatttttaatcttggacccatttgtatgtttaaaatcccgcaaatgataagttgtaatgaaataaggaagagggttttatcagtcttcaagcttttcacctacaaacttataaccaattccccatatagtctgaatgaattttggattggaagggtcaatttctattttctttctaagttttcgaatatgtaccataacggtattgtcatcttctatataattatcgtcccacacatttcggaagagctgtgtttttgtaaatacttgccctgggtttgaagtaaagaattttaacagttccaattcttttccggttaagctaatttcttctttgtttgtatgaactgtgtatgtatttaaattgatagttagtcctttaaaagataaagtggttttttcttgagcagtattgttacttccgagaactaaaaaacgccgcataagagcttttactcgtgcaattacttcgtgaatgctgaaaggtttcgtaatataatcatcagcaccaatgcttaagcctaaaattttatcaacttcgtgatctttagctgtgagcattaatataggtacgttagttttatctctaagttttttacatacctcgattccatctattttgggcatcataagatctaatataacgaggttatatttattttgattaaataaatgcaaggcttcttcgccgttgattgcagtgtctaccatgtataattctcgttctaaatatatttttaataaatttcggatttctttatcgtcgtctgctataaggatacgtatatctttcatatcttcacctgtttctaatagagttttattgatagtacaacaactctctaattatatactagtatttgttaaaataaggttgctagttttgttggaggaaaacgtccacacaagttaagtctagagttcaaattaacttgaatatatttggaaaaataaatcaaagagaagcagaagccgtgctccgataatgaaatcctatagagacgtatctagctaaaagagcataaaaatattaaattgaagttctttataaaaaggtgttgacgattatactttagaggtgtaatatagaacaagtcgccgatgacaataacgtcgcaagcgacaaacgaaataaaaaacttagttgacattgaaagatgaaaatgttaacataaggaagtcgcaaatgagcgaccaagtagttctttgaaaactgaacgaaacaaacaacgtgaaacgtcaatttttattttagatgctagacaaactaactacagtagagtcaatagcaaggccacgacgcaatggagaaagacggagagcgccaacggcgtccatctcgaaggagtcgccagcgataaccggagtagttgaaatggtaataagacgaccaatctgaccagcaaggaagccaagatgggaaaggtcatgcggcatacgctcggcgccagtttgaatattagacataatttatcctcaagtaaggggccgaagcccctgcaattaaaattgttgaccacctacataccaaagacgagcgcctttacgcttgcctttagtacctcgcaacggctgcggacgaccagggcgagcgccagaacgttttttacctttagacattacatcactccttctgcacgtaatttttgacgcacgttttcttctgcgtcagtaagaacgtcagtgtttcctgcgcgtacacgcaaggtaaacgcgaacaattcagcggctttaaccggacgctcgacgccattaataatgttttccgtaaattcagcgccttccatgatgagacaggccgtttgaatgttgacgggatgaacataataagcaatgacggcagcaataaactcaacaggagcaggaaagcgagggtatcctacaaagtccagcgtaccataaacgcaagcctcaacgcagcgacgagcacgagagcggtcagtagcaatccaaactttgttactcgtcagaaaatcgaaatcatcttcggttaaatccaaaacggcagaagcctgaatgagcttaatagaggccaaagcggtctggaaacgtacggattgttcagtaacttgactcatgatttcttacctattagtggttgaacagcatcggactcagatagtaatccacgctcttttaaaatgtcaacaagagaatctctaccatgaacaaaatgtgactcatatctaaaccagtccttgacgaacgtgccaagcatattaagccacttctcctcatccaacgcgtcagtttttgacagaatcgttagttgatggcgaaaggtcgcaaagtaagagcttctcgagctgcgcaaggataggtcgaattttctcattttccgccagcagtccacttcgatttaattcgtaaacaagcagtagtaattcctgctttatcaagataatttttcgactcatcagaaatatccgaaagtgttaacttctgcgtcatggaagcgataaaactctgcaggttggatacgccaatcatttttatcgaagcgcgcataaatttgagcagatttgtcgtcacaggttgcgccgccaaaacgtcggctacagtaacttttcccagcctcaatctcatctctctttttgcgttctgcttcaatatctggttgaacggcgtcgcgtcgtaacccagcttggtaagttggattaagcactccgtggacagatttgtcattgtgagcattttcatcccgaagttgcggctcattctgattctgaacagcttcttgggaagtagcgacagcttggtttttagtgagttgttccattctttagctcctagacctttagcagcaaggtccatatctgactttttgttaacgtatttagccacatagaaaccaacagccatataactggtagctttaagcggctcacctttagcatcaacaggccacaaccaaccagaacgtgaaaaagcgtcctgcgtgtagcgaactgcgatgggcatactgtaaccataaggccacgtattttgcaagctatttaactggcggcgattgcgtacccgacgaccaaaattagggtcaacgctacctgtaggaagtgtccgcataaagtgcaccgcatggaaatgaagacggccattagctgtaccatactcaggcacacaaaaatactgatagcagtcggcgtgtgaatcattagccttgcgaccctcggcagcaagaaccatacgaccaatatcacgaaaatagtcacgcaaagcattgggattatcataaaacgcctctaatcggtcgtcagccaacgtgagagtgtcaaaaacgataaaccaaccatcagcatgagcctgtcgcattgcattcatcaaacgctgaatagcaaagcctctacgcgatttcatagtggaggcctccagcaatcttgaacactcatccttaatacctttctttttggggtaattatactcatcgcgaatatccttaagagggcgttcagcagccagcttgcggcaaaactgcgtaaccgtcttctcgttctctaaaaaccatttttcgtccccttcggggcggtggtctatagtgttattaatatcaagttgggggagcacattgtagcattgtgccaattcatccattaacttctcagtaacagatacaaactcatcacgaacgtcagaagcagccttatggccgtcaacatacatatcaccattatcgaactcaacgccctgcatacgaaaagacagaatctcttccaagagcttgatgcggttatccatctgcttatggaagccaagcattggggattgagaaagagtagaaatgccacaagcctcaatagcaggtttaagagcctcgatacgctcaaagtcaaaataatcagcgtgacattcagaagggtaataagaacgaaccataaaaaagcctccaagatttggaggcatgaaaacatacaattgggagggtgtcaatcctgacggttatttcctagacaaattagagccaataccatcagctttaccgtctttccagaaattgttccaagtatcggcaacagctttatcaataccatgaaaaatatcaaccacaccagaagcagcatcagtgacgacattagaaatatcctttgcagtagcgccaatatgagaagagccataccgctgattctgcgtttgctgatgaactaagtcaacctcagcactaaccttgcgagtcatttctttgatttggtcattggtaaaatactgaccagccgtttgagcttgagtaagcatttggcgcataatctcggaaacctgctgttgcttggaaagattggtgttttccataatagacgcaacgcgagcagtagactccttctgttgataagcaagcatctcattttgtgcatatacctggtctttcgtattctggcgtgaagtcgccgactgaatgccagcaatctctttttgagtctcattttgcatctcggcaatctctttctgattgtccagttgcattttagtaagctctttttgattctcaaatccggcgtcaaccataccagcagaggaagcatcagcaccagcacgctcccaagcattaagctcaggaaatgcagcagcaagataatcacgagtatcctttcctttatcagcggcagacttgccaccaagtccaaccaaatcaagcaacttatcagaaacggcagaagtgccagcctgcaacgtaccttcaagaagtcctttaccagctttagccatagcaccagaaacaaaactagggacggcctcatcagggttaggaacattagagccttgaatggcagatttaataccagcatcacccatgcctacagtattgttatcggtagcaagcacatcaccttgaatgccaccggaggcggctttttgaccgcctccaaacaatttagacatggcgccaccagcaagagcagaagcaataccgccagcaatagcaccaaacataaatcacctcacttaagtggctggagacaaataatctctttaataacctgattcagcgaaaccaatccgcggcatttagtagcggtaaagttagaccaaaccatgaaaccaacataaacattattgcccggcgtacggggaaggacgtcaatagtcacacagtccttgacggtataataaccaccatcatggcgaccatccaaaggataaacatcataggcagtcgggagggtagtcggaaccgaagaagactcaaagcgaaccaaacaggcaaaaaatttagggtcggcatcaaaagcaatatcagcaccaacagaaacaacctgattagcggcgttgacagatgtatccatctgaatgcaatgaagaaaaccaccattaccagcattaaccgtcaaactatcaaaatataacgttgacgatgtagctttaggtgtctgtaaaacaggtgccgaagaagctggagtaacagaagtgagaaccagcttatcagaaaaaaagtttgaattatggcgagaaataaaagtctgaaacatgattaaactcctaagcagaaaacctaccgcgcttcgcttggtcaacccctcagcggcaaaaattaaaatttttaccgcttcggcgttataacctcacactcaatcttttatcacgaagtcatgattgaatcgcgagtggtcggcagattgcgataaacggtcacattaaatttaacctgactattccactgcaacaactgaacggactggaaacactggtcataatcatggtggcgaataagtacgcgttcttgcaaatcaccagaaggcggttcctgaatgaatgggaagccttcaagaaggtgataagcaggagaaacatacgaaggcgcataacgataccactgaccctcagcaatcttaaacttcttagacgaatcaccagaacggaaaacatccttcatagaaatttcacgcggcggcaagttgccatacaaaacagggtcgccagcaatatcggtataagtcaaagcacctttagcgttaaggtactgaatctctttagtcgcagtaggcggaaaacgaacaagcgcaagagtaaacatagtgccatgctcaggaacaaagaaacgcggcacagaatgtttataggtctgttgaacacgaccagaaaactggcctaacgacgtttggtcagttccatcaacatcatagccagatgcccagagattagagcgcatgacaagtaaaggacggttgtcagcgtcataagaggttttacctccaaatgaagaaataacatcatggtaacgctgcatgaagtaatcacgttcttggtcagtatgcaaattagcataagcagcttgcagacccataatgtcaatagatgtggtagaagtcgtcatttggcgagaaagctcagtctcaggaggaagcggagcagtccaaatgtttttgagatggcagcaacggaaaccataacgagcatcatcttgattaagctcattagggttagcctcggtacggtcaggcatccacggcgctttaaaatagttgttatagatattcaaataaccctgaaacaaatgcttagggattttattggtatcagggttaatcgtgccaagaaaagcggcatggtcaatataaccagtagtgttaacagtcgggagaggagtggcattaacaccatccttcatgaacttaatccactgttcaccataaacgtgacgatgagggacataaaaagtaaaaatgactacagtagagtcaatagcaaggccacgacgcaatggagaaagacggagagcgccaaaacaccccctatttatataaaaaactccccttgacttctcatagttggtctttcataattaagtttgtcattttctgcaaactactgaattataaaactactaaatatatttttccttgtaatcaatttttacattacacatattattacaatctattttttatacaattccctgtccttctcttctgtttgaataacatcaataaaaagtggatatgtaaaaatcttttgattattgctatagaccacatattcgtatttgccactctccataactggaaatcttatttctattacgccatcaataccaggagtcattctgttatctcgaagattttttaattttggtagttgaccactataaacaatttcctcgttagaattatatacaaggattttgttattaatttcctccaatccatcttcttcagaaaattgaaatttgaataaaactgatgtaataacagaagccggaagtataggaacagtaattttatttagaatattataagcagtatgctttttttcttttggatcaaacattatattttctgctattaaaatttgacatgaaatattattcttcatacttttctctccttattcatacaaattaacgaaaagtaagcgctatcatttttgggtaattttttactatctttctgataatgtacatattcatactttttaaaataacctatactgcttttcacatctgtactatcaattaccatatgatttctccagtgcttaacttttcttttgtatagccaaatcggtgctgttaatataacaacatatttttcatcaattgtttctagaagtttatcgatattcttaaaataataattatcatagctcagaaaaagaatatgatattcctccatctcgggtatgtgcaaactatcaattaaattatctatttcatatttttcttgcacatgtagtcgtttgttataataatgtgcataaacaataagtacacatgctattaaaccactaattactaacatcagatttatagccatagtttaatctttccctatcataattttttaaagatatgagattgtacaatagcacagtatatacactaagtagccctaagaataaacttatttctaatgttcgaaaagagaaaggtaacaatacttttattattaataatattacgatgattgaatttcttgcaattggagacttattcataaactgcatcttaccaaaacagctacaacttgttttctctaacttatataaatgtttttttctgataattaacaatataaaaccaatcattaaagcaatagtacctatttccttatatggataatatatatttaatacaaacgtgataaaaatgcacaattctaaaattagtaccatataactaaaaaatagtatagattttaatggtaaaatattatataaaattaaatcacattttaaaccatggatagaataacttttcatgtagaaagatgcaaaaaatataaatgctatactcaagtcgatacacgacgatagaatattaatttgactcaccttctaggatagaaagaagttcaactgcattttctatatcatcaattactctcatagcagttatcctgttattttcatctattagacaaaaacttggcgtttcctgaaagccaccttcatcaatcaattcatcaccaaaggagattatattaaattcaaacccaaagtaatcttttatctcatcaatatcttcaatagatccatcagttactaatacaaactctcctttatatgaatttgctatctctgatattttcgggagtagatcaatacatttcatacagcttaaagaaattgcccctagtagccaaggactcttatttgaaatattcattaaatttttaggtaatattttacccactgttaaataatttgtattagattgaggtggcactctatgtttttgaaacatttctttaaacccttttatcattctggagtcctccttaatattctataatacatttaaatttagttataatgtcttcaaacatattatcttgatagcctatttctgcatataatacttgtcctagttcattgacaaaatacgttctagggacaccactaactttaaattctttcttcatcttatctttattacataaagatactaaagctctaccttcaaatgtggatttgatatattcaaagttttctgggcttgtatcgattaaaataagaacatttaatgatgaatctttagttaaaaatttatcgagcgcttccatggaaggtaagcatccttcacatgacgtactataaaatagaattaagagatgttttttcaaaatatcatgtaatttgcacgtattcattgtatctatataaacattttctatatattctcctacatctaaacttttaggaaacctaaaaaatttcctatgcccttctagaattgaatccatagtatcctccttgttttttatttttcatacaattattaagcccttaaatttctgctcttttctacaataatccttaaaatttttatcatatctaactaagaaaaactttaacatacatttcttttaattggaatatttgtaaaattttataaagtttttatggaatattcagggaattaatctatttttaaagctatacatttttaatagctgatactgaatatcttctggttaattctggttttactaagaaaaacaatttaaataataatttccaaataataacactaaaaaaagaatgcctttctatttaaagaaaatggcattcttttttaatttttgctaagaatataaatctattatctattattttctcaagatatatctcattacaaaaatactatatagtagatcaaaatcatactcgcataatatgaatcatcaatacaataaaattcatcatagcatgtactatataagaaactaataattgttttgattgtttatatacaaaggccaatacacaaccaataaaaaaataaccaaatataaatgggaagtcaaaatgcattattgcaaaaaacaatgcactgattacaatactccctacctctttaaatttcttcattaaaatattcatagtagcatatcggaataccagttcctctaccaatggggcaagaattacaattgatataattgcaataggtgaaattgatgcagctgcaactatactagatgtgttttctgattgcgtagaaatttggaataaacttttatctaaaaaactaccaattatctgtgcaaggaaaactaaaacaattccaactagaatccatccacatgcggtttttgataatttaattgatagtatagatttataaatatgtttttctttatatatagtaaaagtgataattaatataagcagaaacccaattagctcccaatgtaccaaaatttgttgaatcgcttgttcttgattctcatgaatatcataccaacctgtcttagctaataactgcacacctattattcctacaaattgattcataataaaataaataagaatgacataggccgatttatgtatattagtagtattcatattattatattcatcacccttcttctttagacatttaccatcatctacaaatcctattctgaatttttaaaattataaaaacataaaaacatcatattttttattacacttcggaaaggtttctttacgctaaagtaattctttccttcataggaattatctcacaatctacttttactaattttccactaacaaatatctattacccaaacaaaaacaaaacttctttaaattttataaagggttgtgctttacatccacaaccctcgcttttctcttaatccacaggcacttcttcttgaccatgtggaatttgtgcaattggtgttacaatttgtgcatatttgtttacctgcactttaaattgtcgtggttctaaaaagtttacctgttgaattaaaacttcaatatgaaacgtatctacttttttcccacgttcaattttggtaattcgtgcattgtaaaacttatccccatttaggaaatatcgttgaacagcttctgtagcaagcatacgttcattacttgtcattttcattggttcaataccaaatccagcctttgtaaacaaatacgggacatcataactactattagaaatttttcgtagtaaatcctctacagcttttgtctttgcgatatattcctcttcttttgtatcaaatccctttggcttatctccaagcatctcaatttcatcttgatttacttgctcttcctcttgtacttgagatttcatcatgtaacgatgaatagtattataggtagtaacacctaccactagtacaataattcctaatatgaccaagtacttacgaggcatattggataaaatgttgattattttcttcatctactctcatcccttatcagtctataacattacggatttgcgtcatatgttgtcctcttgccgtatagtttagacctgtaatttgtacacccttattatcaccaatatgaatcattttctgatttcctaaataaatagatacatggttaggattttcatagaaaattaaatctcctggttgtgcacgaccgatatctggcacctgttttccttgtccaatttgagcacctgtccaatctcctagctgaacacctatactggttttaaacacatattgtgtaaatccagaacaatctgcactacctgcagctggatttctagcaccggacacatagctcactttcccttgcccaagccatttttttgcttcttctaataccttttgtcgtttagcatttgtcattgtaggagcaccacctgatgataaccctggatcatcatttttcttaaagaatttcattggatccgttggttggtcattaatacgaatttggaaatctaaatggacagcgtatccaaacatattaagaacaccaccaacatagttagccccccccatttccccaataatctgtccttttgttaccatagttcctggtgcaactaagattttacttaaatgtaagtaacgggatacaacgccatttccatggtcaacatagactcctaaaccaccgttgtttacatttcctgttttatccgtaaccataccagcttccatcgaccatacggggtctcctggttttccggcggtcatggccccaatatctacagcattatgcggtttgctagcatgaatttcatcaaatgtacctgtaatacgccctgatttcgttggccatttccaacctttatcagaaatccattctccagatacatctgccacacaacctaaatctttgtaatattttaaaactttggaaacatatgtgtagagtaaacatccagcgccttattacattcctgtgataggtttccatcacgggtttataggtaaatccctttcctaaaaaacctaactttatcatacgaggaggtggggataatggacaagacggaaacaagggaaatagtaacacagaagattgaaattagagaagatgataacggaaatcggacacttataggctatgcagtaaagtgggaaaagaaatccgtagttatgggatattatcgtaagtttcgtgagcaatttaaaaatggagcattcacagaaacattacaaaatgatgaccaacgttttttatggtctcatgatacatctaaagtgctgggaagaacaaagaataatacgttacgtttgagcgaggatgccgtgggcttacgctttgaattggatttaccagatacaactctaggtaatgacacttacaaatctattaagcgtggagatgtagatggtgtttcgtttgggtttagcatgataagcgaagaaatccaagaaccagatgatgatttgatgctacgaactgttacaaaagcaaaactattagaagttagcgcagtagctttcccagcttacccagattcagaagtaagtgctaggggatatgatccttataaacattttacagaagaaaaaaagcgctcggaaaagcgcagaagactatatttacaaacattattataaaaggtggactttgaacatgaataaagaacaattattaaaacgtaaatctgaaatcagtgaattattaagtgatgaaactcgctctattgataaccttgatgcaattgaaacagagttacgagatattaataatcagttggcagcgattgagaagcgtgaacaacttttaaatgaagcacgttcaattaatgaaggaaatgcagctggtactaataagattgaaacatttaatacggatccatcaaatgaaaaacgtgaacttggtacaaatacagttgaatatcgtaatgcttttatgaattacgtattacgcggtgaaacaattccagctgaattacgtgcaaatgctgttacgaaaacaagtgacatcggttctgttatcccacaaacagtattagataaaattatcgaaaagattgaagcggtaggaatgattctacctttaattactcgtacagctattaaaggcggcgtaacagtaccaacttcaacagttaaaccagtcgcaacatgggttgctgaaagttctggaagtgataaacaaaagaaaactacaggaagcattactttcaactatcacaaattacgttgtgccgtagcggtttctcttgaagtagaaacaatgtctcttgcggtatttgaaacaacattaattaataatattgtggaagctatgacaaaagcgattgaacaagcgattgttagtggtgatgggtctggtaagccaaaagggattctagcggaaacacctgttgacggacaagcattagatgttgcgaaaattaactacaaaacgttaacagatgcagaagcggctttaccacttgagtatgaagcaagcgcgatttggacgatgacgaaaaagacatttatggaattttcggcaatgacagatgcagacggccagccgattgcacgtacaaattacgggatttccggtaaaccagaacgcattttattaggtcgtccagttgttctatgtaattatgttgatagtttcgcaacggctactgaaggaacaacatttgcattcttatttaattacaaggattatattctgaatacaaactaccaaatgggtgttaagaaatatgaagacaatgaaactgacgatcaagttacaaaggcaattatgattgtggatggtaaagtagtagacaaaaactctttagttgttttaaaaaaagctccagcagcttaataaaggagtgatacaatgaatcatttagtcttgaatgctttcattgataaagaaacaaaagttggatattcaaaaggcgatatgtacgagtcaaatgattcggaacgtgttgcctttttaattgaaaaaggattcttaaaaggaaataaagagatttctacattccctaagcatactggcggtggatggtatgaattatcgaatggtgaaaaagtgcaagggaaagaggaagcgatgtcagctgaacaatcattgaggggtaacgaatcatgattttaaaagatataaaaaaggcattgcgcatttctcatgatgcccttgacgatgaaataaacgatgcaatagaggaagctcgacacgacttaatgttgtcgggtgtttcttctattaaagcgaatcatgacgatgatccgttaatcaaaagagcgataaaagtatattgcaaagcagaatttgttgctgaggtcaaagaggctgaaagattccaggcatcgtataacatgttgaaaaatcatctcactttagcaggtgattacaaatgaatgacattgtattctttccagttgtaacgactactacagacgatttaggacaaatagaagtagcagaagagtttacaagacaagtattttgtgagaaaaaaagtgtttctcaaaatgaattctttcaagctggtcaaaatggttttaagcccaaatgtgtattgattgtttacacattggattatcaagaagaacagaaagtacagtatcacaacaagaaatacaacatttatcgcacatacgaaagagacgatgaaagaattgaactctattgtgaggtgaagacaggtggctaatatcgatgatttatccaatgaaattgctagggaactacaaagatatgccaatgtaattgaggaagacatggaagtggcgaaggaagaggtagcggataatttagtgggtgaattaaagcaaaaaagccctaaaaatacaggtaggtatagtaaaggttggcgaaaaaagaaggatgggaacgcaattattgttcataatgctttaaaaccgcagcttactcatttactggagaaaggtcatgcgaaggcaaatggtggacgagtaccagcaaaggttcatattgcaccagctgaagaacatgcgattcatgattttgttgaacgtgttgaaagggcgattgggcaatgacattaggtgaactaaagaaaattcttgaggctacaggttatcctgtggcttattcgcatttcactgaaacaccaggtgttcccgtaccttcaccgccttatgtttgctactttgtagatggatcacctaacatggcagccgacaataagacctatcacaaaataaatgatgtaaatatagagctttatacaactaagaaggatttagttgcagaagccaagctagaacaagtcctggatgattatgagattccatatgagtcatatgggacttttattgaatctgaaaaactatttcaaaaaatatatgaaacgaggttgttgtaaatgaatgaaaacaaggtaacattcggtttgaaaaatgtacattacgtgccattagatattaaggatttcttagttacatttggtacaccaattccattacctggtggagtggaactaacatttgagccacgcggtgatttaattgaattctatgcggatgacatgctttattacgcagcaagtaataatcagggttacgatggaacattaagtattgctactatcccagaaaagtttgctattgatgcacttggtgaggaattagacgaaacagatggtgtattgaatgaattggctgatgcaaaaggaaaaccattcgcattattatttgagtttgatggtgatgtcaatgcaactcgacatgttatgtataactgttcagcaagtcgtccaacacttgcatctaaaacaaaaacaagttcagctgagccaaatacaaatgaactgaagtttgtttctagtccaattattttagcaccagggggaagacctatggttaaaacaaaaacaacatctaaaacaacgcaagaaatttataaaaattggtacaaggaagtgtacgttaaaaaaccagcagcaccaaaaggagcgtaatagtaaatggaaaagacaattacaatagatggaaaacaagtccgattaaaaagtacagcagctactgttaaacgatataaagcacaattcagacgtgatttatttgctgatatgtttaagttagggattttgtctccttcaaatcctcaagagggttcactagccactattgatttagcaaatgcagatttaagtaagctagattttgaagttgtatatgatttagtttggttatatgcgaaaacagcaaatccagaaattgccgaaccaattacatggttagacggttttgatgaattccctatttcggatattatcccggaaattatggatatgattcaaagtacaatgggagcaaaaaaaaaataaacaaaagtaatggagagcaagggacgttcagtgatgaagaattaaccactgatacgttccttgctctttgttataaagcgaaattaacgcattgggatctggacgtcatgacgattggtgattgctttgattacattgctgaattcgctgaaatggagaatccagacaaagaaaaagtcagaaaagcaaaccaaaaagactttgattcattctaagaaaggggttaaattatggccggaaggattaaagggatcaccattgaaattggtggggaaaccacaggtcttcaaaatgcattaaaagatgtgaataaacgcagcaatgatttaacaaatgaattaaaagatgtagaacgtcttttgaaatttgatcctggtaatgtggaagctttagctcaaaagcaaaagttattgacgcaacaaattgaaaatacaacggaaaagctagataaattgaaggcagccgaacaacaagtgcaagcacaatttcaaaatggaaaaatttctgaagaacagtaccgcgcgtttaggcgtgaaattgaatttacacaaggatcacttgatgggctgaaaaataagcttggtaatatgaaatctgaacaagagaatgtagcgagttcaacaagacaattagaaacgttgtttagtgctacaggaaaaagcgttgatgattttgcaggcgcattaggtaatcgtcttgtaaatgcaattcgaaacggtgcagcaacaagtaagcaattagaacaagcaattgggattattggacgcgaagcattaggaacagaagctgatattgaaaagttacaacgtgcgctacgatctgtggatgctgggaattcaattcagcaagtacgaaatgagttgagagatttacaacaagaagctgagagaacagagaagaagtttgaagggctccaagtaggacttgaaaacgtcattggtggaatggcagctggtggcggtattgctagtgcagttgaaaaagcaatggatatgtcaaaattgaaaactaagattgatatcacttgattttgtacatgcttaaacaagcgaaaatgtacatgtttatcttgacatttacaccccccatgatattaaaatattttaagtgtattttagcattcttacaaaaaaacagagaagatattagccactatattataaagcgcaaaaacaaactagtttataaactagtttgtttttgcattttacttgatttaaccatccattggatcaataaaaaagtctttatcacactccagtagaaacgtgggattatatatttaaaatttctcaatgtgtgaaataactaaatatggtaaaattatatttgcgagatacatattattaaaattaagatggttcaagtcgaaggaaggcaccttagggtgtcttttctttataaaaaaagacgcattacgcgtcttaaattaatttttactatattgttctttagattttacgctccgtccaccttgttaagcgaaactcaggaacgtacagattgtaaaaaagattagctgcagctgccagctaatcttttttctacaatctgtagttatcgagttgagtaaaggtggagcggtggcttacggaatgtaggcaactgccgtacatcccgtgccatgagccctaccagttttcaagttaaaagcaactactaacatttcaatcaagacaatctaacttataaactagttgacttgatctcgcatctgttctcctactttttccagactgaaagattttaatttttcccaactctttttagggtgtctcttccttgtatgtcttttcttttgttccttcttaatagcatctatcaacatttgtgggctatgatgaaagtatgcttgattgtagccgtcctcaatcataccgaaataatcacattcattgtcaacaaagtaattatctacaattaatttctcaaattcactttcaatataaccccaattgtgtactttactatcagaaattgaaacaccattagaagttatttcgagcttatccaataaatagtccatatactctcttgatattttctctaattcctcaattttcttcatatgttcctgattttccagaataaattcaatatacttcttttccatcactctcagccccttatttctttactgtcccttatctttatatttttccttctagcacttatgcactttctctttatgattttactctaaccagcatactaacataaaacccacgttaagaaataattacaagaatttatatagagaacaccttgcgttctctcaaagaacaacagttaaccgtactctatattgccagaacacgttcgagaacgtgttcttattctgagttctaggtggcattatatttgtatagatatttccccttaagaacactagttgctcttaaggggaacgacatttattatgtgtaaatcacatcgaaaactaaactagttgtcaatttagtttaaactagtttataaactagtttatttatatttataaaaaattagctattaatagctaattttttatatcgcttttcattttattgtatttttctaaagctttaagcgctgctgattttggcttagtacccatttctgaaaccttcggttttattatttgctcacttacattactttcattgccatttccctttatatcagaagatggtatttcttgagcgatgtgagctgatggtacttcaaccttaccgcctatagtatcttcctctttatccgaaatcggcatctcattcgtattattagttttaattattttgttaagctcagatgtaccaccaatcattgttaaagctaaatttaatagcatctcttgtcctatactactagatagcatttcaatttggccctgagacaaattttctgtagttaacgggatatacaatgctcctgtactaccgctatttctattgaacttcaaaccatcttgaattaatttttcagtaagtttatttcgacttatacctaattccgatttcatttcattaaattcattaatccatttagcatctatagaaggtgtaaatgttcttcccttacctgcctcataaccgacgttactcatatataacaccacacttcatattcttatatagcaaggaagaaggtgtgaatccaccttctattatgcttcaacgccttctttatttaattgctctaatagattagctattaaatatgatctacttgtaaagtatgctgactcttgaatgtttttaggtaaaataaagccatcttgttccttcagatctcttaaaccagcgtaaccaaataaaactccaccaccaactacaatgtttttatccgcatttgttttaaaccaaaacttcattagagatgctttttgatcttctgcatattttaacatcccatccattacaatatctgtaacattctcttttacagggccccatttcacactaaatgtcggcttataagtatcatcttcaatcattttctctacttcaggcatcactagcctttgaataaaatcttctcttgttttaaaaggtgactcaatttcatctgtcatgaaactttttaaaatctcattttccatgaaacgttcttttatattctttaaaatttcatcaatatacttatttgttcctaaatccgtatttgtagataattttttatttaactctccatcttcaaagaaagcattatccgaagtacctgcaccaagatcattgatagcatatgattctccaatttctgcatccattccttcaacttccactatttcaccgtttacaatgtcaaatagtattgccaagacagaggaaacaccttcaacattcattgttccatcattaatcgtaatttttatctttttaccctcatatgtaccatctaaaaattctacagtatgttctccatagagcatttctaaaatttgttcttccccacgtagtttataatcttcaattggcattccaccactaaaaggaacagaaacttcttcttttccaattctcgctgctgccaccgccatacttgtgaataatggaatcaaatgtaacttcttatttttctggctaaatttatcttccgtttttcccatttcgtctacagttggttcttgacggtcttcttgatctttagcatatgctcccacataccacgctctgcttcttgcatcaccatctaaagaattactaattatacgaacatgtaataactcgatgtcttcatctttctcatttacgtaatcatttttcttagaaggtgcagattttaaatctatttttgctggcggcgcttctgcgattactgttggaatagcaaaagattcaatattacctttttcattcaagaaactaattttcgctttaatattacctgtatcaaaaccaccaagtaacatgtttttagatagcatttgctcaaccattatattttcctcctacaactagtttatagtttagtttaaactagtttatcaactagtttaattaatgataaaaaaatttatatccatatttaacttttaaacataatgttcgtgaagagaacagtagttgttcgcttcacgaacacattattcacttgctttgtataaagaacatgttctgtaacgtgttcttctcttgaaaagtaatttcgtactcaatatgtattagaggacatcatcaggacgataatgctctacgccagtacactttttaaagtccttgctattccatgtcaaacaaggaactccgttcttagtagatacagctgctaaataagcatcagcaaaatcaattctattggttttatattcatgtaatgcttttaatactacatcactttccaatgttttaacgcctggtgaagtaataattgttgtaagattatcggcaatctcttcatgagaataaccgtatcttttcatacctaaaacccaggtacactctattatcactattggtgttaaaaataatgtaatttcttgattaacagctctcttgaagatttcaaaagccttctttgattgttcttcatcgtcatttgtcaaaaatcttacaatgacattagtatcaactacgtattgcatgtactgcactctcccttattcggaggaaatcatttcttctttagcttcacgtctaatttcttcccaagacaaattcggctcaccagctttaggtggcatagcaccaaacaatgccaacaaagaattttttttaactacatttacaaaaacattgtctccttcaatcacaaattgaatctgatctcctgcttttgcatctatataatctctaatcttagctggtattgtgacttgtcctttctgagaaagagtagacgtaaattgacctgaagacgaaattaaccctctgttctcattttttatttgcatagtacacacatccttctttattttccgtaggtgttgcattttgttatttctcagtaatttaatccttaatactcctatactgtatagtgtattgtaaatgaacatataaatgttcaattcttgatatagtaattagcgtagtattaagtgtgcctctgcttacttattattatactactaccaaaaataaaagtaaagattttttaaaattctttaccaaaaataaaagtaaagaattcatccaggtctttacatcgagagtcaaacttcagattcatacccttgtatttacccatcaatgaaaagtttatccttatgggattcagccgagatacgtgtaaaaatgggtcatagcctggaattcgtttccataaaatgaccttttgctgtctttataggtatataatgaaattttcaacaagatctatataaaaaacaaacgattctttcaacaagctgtcgaggaagaatcgtttgtttttttatttcagcaacactctcacttcacgtctaaacgcttatagagaaacgtgtcgcgcctgaagactgcataatatcaggtagtttttctgaaataccattgctctctaccataataattgctagtacatatggaactagctctggtacaccttgcgctgcacattcctgctccaccatcgattgccacctcatgacttcaggtggtaaattctgcactgaagcattcccacttatgccaccattcggtgtacctgtagagctttctccacccaaaatcgccatactaacaattaaaagaatcgtaatggctgccgcaattattactcctgtagaaccacctaacaagcgaacgagccattttattcttttcactttcttatacttgtctattgctgtttcttgcgtcgctgccattttactgaccacctttaaagcgttctaattgtttctcgtcaggatcaaacatcacgttatatgtttcagtagaacttacctgtacaattgcttcccctcgtttcaactcaggtaagatacgaaactccgattctgttaaactctcacctagaacactttttaaagtctctaacacggagttatccatgttcaagaatattttgtattgagttaattcaaagatggctttcatcgtagacacatccactgtacttcctggtggtggtaacatttcttgtggggattgtgtcgcaaaaaatatacctgcaaagaattttcgcatctcacgttcgaactctaatacataacgattggcaaattcattttgcgaattgataatgttatgacactcatcaaggaaaaccatgaaatacttaacgtcttctattgataagtttttttcttctcgtaaatacttcatttgacgaccatttttaagcgcatgactccaaatcaatgttaatgcggtaaacaattgacagttaaaaactgatttatcgtattttgaaatcccatcaatatcaaagaaaacaatctgctcattttcaaagtttttaagtgttgtatgaccgttaaacatatcaccgtacaccgtaatcatgtcctccacctgcaatttgattgcttctaaatcacggagacgttgtggtgttgctcccgcttctagcttcagctcacttaaatatttataaaaatcttctaaaattggatagtgattaggagggaatcccgttactttgtacgggcgatcacttcccttttgaggtacaagtccccactcaatatagaaagcatacaaatgtttacgaaactcttgaatcaccgtatcatcaaattctgaatttaaaaatcgaaccatattcgtgactttagaaatatgttgaatgaatgaacctttctcatcaactgcacctgtatttgtaattttcgttgcgaatacttctaaggggtttatcattcctgtttctacttcttccgaatcttgaaccccacttaaatcaattattttaccgccttgctgctgcacaattgtgtaataatctcttgctttatcaaaaccacgaatgaagcaatctttcgcaaccaatccttcttcgatttgtttaagtagtgttgatttaccagcacccatcttaccaaagatgaaaccactaaatgatgttctagtacttgtagagaaaaacggatctaaaataaatgcgccacctgtagtagtttgtcctagataaattcctcttggatcttttaaatcttgatgatgaaatggaataccgaaaccaatattttgtgaaggtaatggatagccacttttcactcccaagtattctatttgatcgtcatagcttgcaaacaatgtttgccactcttctttttgtttaaaaacatacacttgcgctttatagttctgccccgcaatttctttcttaatatcaccaattcttttctccaattgttctagcactggatcatatatgaagatacgcaactttatgagtttaacaatttcaccttgctgcgtaatagaacgagcaaagtctgttaaattttgtagttcccaatgagcatcgtcacgatcagtagaacgacgttctgatgtcatacggtcttttaattcagtaatagaacggttaatgtcttttactacttcttctttattcgctgtcgctatgtctacacttgaaacggtatctttattgttcatgagtgccgttagccatagcggaggaatatcttcagctagatagtacacatgtaaacatgcaacatagcaatcaccttgcgctatgtacttctcattaaatttaatgccaccttgcggctgcaccctcgaaataaaatctaaatcatatccttcagtacgatattttcggtgttcttttttccccaactttaccattattcatttcctccttttacatttctgaattcatgttttgtagcttaaagattagcttctcaacttcttttgctttcatattctgcaagttaaattgacgtccaccatagcgcttcatgtccttcacattctttactaactctgtttcattttttgcatacacaacaatgaagaaagccaattcctttaaattcttttctacccacagtacccgatttaaattttcaattgctaaactatagcgttgagaccataagtgttcttcgtttctctctgacacatcttgactcattttcccttgataacgtagcgccatgcgcttccagtacacctgttgttctgttgtttctgtagagtacgttagagacaaaatcttgaatggctcatgatacacacgacataaactagttaactgattcataaatcgatttaaatcatctttgttcatagaaattaagtccgtagtctttacctttaaatacacctgcaagttgtctctacgatctactaagatcccctttttttgttccagtcgtttataaggtgcaacatcaacaattgatgcatccgtatttttaaaagaagcaaagatcgttgaaataaaactttgttttccattacttttctctgactcaacttgtctctttcggtttacttttttagattcaactgtcgcaactttcatcttcatctttcctttcatgagatataaaaaaggagagcgctatatctgcactctcctttcattcctatttcttttttgtttcgctgcttatggtatttacttcaattggatgatagtttttattgtccatcttcaacatatccaaaatcacaaatatatttctatttgtaggactgttatgaggtttaatacataagaacaccccaaacgccccaaacagcacataaaacattatccttccaagtcctccgactggaacaagcttcgacatataacttgctagtactaacattagaactatgattgctccatccatgatataaaagaaggctaacttaatttcttgctttgtattcttaggattacgcatcatttccattactcaacactccccttattacgttataaattttatttttcccccttattgttacaagacttatactctcttatcgtacttttaatatataggttcatagttttaaacattttactatcgttttccatacgttcctttataaaaagtggatacttttcaaacttagcataatattgtttaactggatgttcctcaggataatctttaatatcatattcataaacacgcaaaccataataattacgcaaacctttaggattcaaaatgtgcaagcataaaaatgacttataaattatctcctttgcttctacagaatcagttaattcattagctaaatatttttctgtataactcggaaatttgtctacacaaaaatcaaatatttcttcttcctgtgttgtaaatgctatcctttgttttcttttccaacgtataattgcgtaaatagtttctcttacaaagcaatatacccacattgctatttgtaaaatccatacccccacaattaatacaaataaaatcccaataatccatttcactaaagtatgatctaaagaccataaaaaccattgcttaataaagggcttgtcatatattagccaacttaataaggcaggttttactataatgcgcagtaaaggatcaagctcaagaaagatatgctctgaagcatctaattgcatatctctccaaaaccctccattataggcaataaaacatatcatatatactacaaatgaaagtgttgttgtaaagataatttgcattacaaattgattatttagtatttctattagaaactctttcattaaaattccccccaaaaaaatcttgatttacatactcagcgttcattactgtaaccaacttaggatcttttttcttctttcgccttagcactctaaaaatctgtttaaaaaaagttgcgatcatgcttaacacaatcgcaactcctaacatcaagatagcaaatatccagttattcatcttaaaatcccttttgctttctctctattttttgatgacttgtttttcgagtacagatggagagaaaaataagttagaaaggaaaaaataacaatgtaatgatataaatgatctaattcaaaacttatttgaaaaaccattatagcgacggcagcaaacaatcccgctattattattaagatactcgcctgtgattctcgctgtttcatctcaaagtaaattcttctttgattcgcaatatcaattactttcacagctaaccctcctaatctcattttctacgtaattgatctgtccgattatgtttacttcctctttgtcttaatcctgattttgttctttctactacattatcttgtacatttacatctcgctgtactgttgctgctcctgcccttgcagtatgctctaccgcttcatttcctcttagattttgtacatgcttaaacaagcgaaaatgtacatgtttatcttgacatttacaatagtataaggggaaagtctttatggtaatgcggaattcgatctttatgtaggattacatgatttaaaagttcttgatttatatttttcatgagtttagcgctccttttttgagaactttgtgtatgtagaagcttttttatggggtaaacaagtgaggattgtttattaaatatattcatggggatgagtaaatattatgagtgtttttgcagtcaacctgaataaggaagctattctaaaatgaaaatagaaaataaagataatgaaaatttataacaaacatacaatgataagaggatgaataatcaaaatgatccagtttatttgtgtatatttttaagtttgacgataggaaaaatttattactagagagatgatattatgaggaagaataattatttaatagtaggtggaaatagtttcattggtatcaacctcgcattgggtttattgaaacaggggcaaaatgtaaaagtattttccagacatataaataattttcctcaaaatattataagtgaagttgaatttattaaaggtgatttagaaaatgttgaggatatatataaggctttagtgaatatagatattattatttatttagctgcgacgtctaacgtagcaacttcaattgaagatgttttcggtgatattaatagcagtctattttttcttaatttcatggaaagtgttaaagattttcgtattaaaaaaattatattggcttcttcgggaggcacagtttatggtgaacctgaatatttgcctattgatgagaaacatccattaagaccactttccccgtatggaataacaaaagtttcgctggagaattatttgtatttttataagagaaaatatggaatagattatgttgtatgtagatattctaatccgtatggaaaataccaaaaccccttaaaaaaagtaggggccataaattgttttttgtaccagcatctcagtaatgaaaggattcatatatatgggaatccggaggagattattagagattatatttatatcgatgatttagttgaaattactatacaactagcacaattaaatcaattgaaatcttgcgtatacaacatagggagtggcaaaggtctttctttaaaacgaattatagtggaattagagaaaataacagaaagaaaagtggattttatctgttataaacaaaaacaagagaacgttcaaaaaatcattttaaatattgataagataaaacaagaattgaattgggaacctaaaatagattttaaacatgggattagattaaataagctatggattgaagagttcttatgtagtaaaaaataataacccacgctctacttgtatataagcagagcgtgggttattattttatttctttttctataacccaaaggtcttgatgttcccaccaaaatccttcagtatactttttgataattgggttatggggtaatgatttaattttgtcacacacgtaagagggactaactatcgtttgtccgtattgattcacatctaaatcgaattgttcactagaggagagaaaccaatagcccttttcatttaaatttggaaacccaaagtattttttgctttgatagccatgggttgtgaaaatgaataaaccaccaggtgaaacagcgttatacaatgtttgcagccaacgaaaccaagttgtatcaggcatatgagagaaaaaggatagacaaaaaacgatatcgtacgtagaggagtccaattttaactgttcaggctcaggatgagataatatagaagaagtatttaatttgttttcaataaaggaaatggcctcttcgtgtatatcgcaagtggttatactcaaattcgtttgtagatttaataaatgacgtgttacgcagccgtatccggatgcaaattctaacaattgaattggattggctgtaggaggataaagggaagtaattaagtttaagagtatttgtgctgagttttgcccatctttaaagtagtaatctatcgcttctttttttgatgggaagacgggattagtgacaatgaactgaaagatatgatcctcaggatggatgcttgcatttacattataactgtgtgcgatttgagaaattaaatctttatgttcctctataaagtctttcaaagagtattcctcccttgagtaatagtagcaacttacaagagatattgatggcatagaaagcacatgtttaaattttcaagtatgctttaagatactttctatatgtatacattttcattttagaaatgccgtcgatagtaaatctttctttaatgaaattttgcatttgcacaacttcattgtaatgggagtatgaatcttctgttctcgttacgctatttaaatgtcgtctatgatagtttaagggggctggattgaagtaaatatctccctctgtaagaagagaaacatagaagaaccagtcgccagctattttgaacttctctaactgtttttctgttttcttcatatctatatttttaaaaactacacttgaaacattaggtatagtatttttgataagtaacgtatcttgtatttcttcgaccccttttcgaaaatagggggctttccatttttctttatcgatatcatttgtgtaatttaaataatgattagccaatacatttccttgttcatctatttgttttgattgtgtgtaacttaaggtaatattgttatttatataaaacccctgtatcacctcttgtaaaaatgtcttatcgcataagtcatcggcctctgcgatccaaatataatcaccagttgctgcagagactccttttatccattgtttaaatacagaaccagagtttttatcattaataatctgttgaaccttcaggtgggtcttattttcttttgaaagcagctttttaaaagttgatacgctatgatcagtggaggcatcgtctaagaaaattagttcgtaaagagggtaggtttggtttaatattgattcgattcgatcaggtaagtatttttcataattatagttcggtatgattacacttatctttttgtaattatgttcgagaagatctagtaattgataaatgtaattaagaaaattgaagtttttttcgataagttcttggccaaagcttcccttttgtaatcgtaatccctcatcatgaataaattcatatattttttctagcattttgggtaaatttaaaaagtctactaaggcaccagttttttctgtaacaacatcttcaaaacctccagcatttttaaaccctataacaggaagttttgcatctaatgcttctaaaacaacatttggaaaaggatcttcccttgaagttaataagtataagtcagccccagcgttatataatccgatatcgggagtaggatcgactaatgtgaaatgtgctttatatttagggggcagtgtattcaggaattgaacgtctgttctccctacccaaatgaaatgaatatccttgtgagtctttcttactgagtaagagataagtgagaatagatctattccttttcgataatctgcgaagcctacacccaagatgattttgctatctagaggcaggttaagcttcttacgtaactcatttctagcttttgcaatattgttcttataaggattgtggttaaacaaaccttgagggagaatgtgacatttttgaggatccaattcagtgattgtacgaaatttttcatatacgtattgtgaagggaagacaactttgtaagcaaattcagcgatgtttttagctttcccttcagcagagtactgttgtattaaatgcggtaattcatgtattaatgaaacaacttttatattgtgtctagctagtaatgcgacgatatcgccacttatgacagtgctacatatggcgagggtaaaattctgtgataataaatcctttattaataattcgaccttttcttctgtttgataaccttgctcgagacaataaacaggaccgtacttttgaaaatcgggaattaaaataccggatccaatagaaataattgcaacagagtaatcaaagttttctttaagagctttaatagtatgtaaagaaagtagctgtgctccgtggaaatgggcatcatgggatacataaattatctttttattaacatgcatttcataacgcctcctaagtgtattagatttctttcctttttttaaaggtaaagaagagaagtgttttatttataatccccctagagatgagtaggagggagtacgtactaaaagaaaaaatactatccttaatatatatttaccgggtctcacattcattctttagaaaagtattagtattaagttagagagtgtaagctgcagattgttaatctgaatacataagtttaagaagttctaaggatgtgttagaaattaagagagggcaaagcttttatgatttataaaataaaaaatataaaaggtattgacgattgatctacaggggtgtaatatagaacaagtcgccgatgacattaacgtcgcaagcgacaaacgaaatgaaaaacttagttgacattaactaacgaagatgttaacataaggaagtcgcaaatgagcgaccaagtagttctttgaaaactgaacgaaacaaacaacgtgaaacgtcaatttttattttagatgctagacaaactaaaaaacaccccctatttatataaaaaactccccttgacttctcatagttggtctttcaactttctatacttattataacacgcattgctatgcgtatcaataggtgagggtaaatttctctgtttttttatatgtttttttatgaatatatcagtatatcgagcacccaaattgggtgctttttattatgtgaaaattacataggtggtgcttagtaaatgacacgacattatttaataggtacattagttaattggcgtgaaagtgtagaaagatttcactacaatgaatcattccaatttttaaaagaagaattccaattaagtgatgaagatacaataaaagcattttggttatctttctataaatggtacgaatacagacacccgaagttacgagagttattaggagaatggtaaggagtgagcaaagcgaatggctaaggaatatgcaaaacgcttttataaatcaacagcatggaagaaatgtaggggggcatatattgctgcaacattagatggaatgtgtgagcattgcaaagaagtacctggatatatcgttgaccatatagtggagattacaccagtaaatataaacaatccagacatcacattgaaccatgagaacttacaatacttatgcttacaatgtcataacactaagacatttagtaagtacagtccgatgagggaagatgtaatgtttaatgagaacggtgaattaattaggagggattagagatgcagtgtaatggtaaggtgttaaataaagaacaagtagacaagttacagttcatgattaataactattctaataagggaatggatatttgtacatgtgatgtagagcgggtactaaacaaacaatatatgaaactaacaaagctagagaaagctattgctcttagcatagtctttaatgctattgataccaaggaactagatggacatgtaagtaaagaaaaattatcggatgtacttaaaataattgaagcgttaaaagaagagatagatgcagataaagagttagaagaagaaaaagaagcgcatctaaatataattaataaactaattgatagtttattagcagaaaagaatcaggaacaaaaagaaccaagccccccctttcaaaaataaagcaaagccccttagggggaccgagaggggagcttcacgtaacacacaggtcattgctatagggggtgtggtcatgggaggagtgaaattttatgagcgataatttagatatagaaaaagaaaaacgaattaagagagagatgacacgattaaacagtttattaaagaatttagagccgaagaaaaagagagctgtttcttcactcataaaaaacgctgcttttatggctgtcactttagaagatctgcaagaagaaattaatcagaatggtgttacggaacaataccaaaacggagcaaatcaatttggagttaaaaaatcttcagctgttgaagtatacaatacaatgataaaaaaccatgtacaggtaatgaaacaactaactgacttgcttccgaaagaacagcctaaagaagaggatgatgggtttgaagactttgtgaataaaaaatgagtaaacgaataagaaaacagtatccattaacttataatccaattattgagtattacaatctcattgaagcaggggaagtaactgtatctagtaaagttaggcggatatataagaaactcgttaatgatatatacgatacctcttctgtatttgagtacgatgcgaataaagccaatcatgtaatagaattcattgagaatttttgcaaacactcaaaaggtaaatggggcggtaagccaattgaattggagatttggcaaaaagcatttttagcagcttcttttggatttgttcataaaattgatgggacgagaaagtatagagaagtactcttaattgtggctcgtaaaaatggaaagtcaacaatcgcttctggaatagggttgtatttgcaagttgccgatggtgaaccaggtgcagaaatatatgcagttgctactaaattagaccaagcgaaattagtttggctagatgctaaaaggatggttaagaaatcccccgtattattaaaacgaattaaaccgcttgttcgtgaattaaatgcagattttaatgatagtacgtttaaacctttgggaagtgattcagaaacacttgatggtcttaatgttcatggagcgatgatggatgaaatacatgcttggaaggataagaatctatatgacgttatagtggatggtacttcttcaagggaacaaccaatgatatttatgattacaacagctggaaccattcgtgaatcagtttacgatatgaaatatgaagaagccgaaatgcttttaaatggtttggacgatccagacggctataaagacgatcgctttttaccaatcatatatgagttggataaaagagaggaatggactgataatactaaatggaaaaaagctaatcctggtttaggtacgataaaaaagatagaccaacttgaaacaaaggtaaacaaagcgaaagcaaattctttgctagttaagaacttactaacaaaagattttaatatccgcgaaacaagtacagaagcctggttaacatttgaacaattaaataacaaggctacctttgatgtagcaaaattaaagccttcttatgggattggcggttgtgatttatcttcaacaactgatttaaccgcagcgaaggttatttttatgcttccaaacgatccgcatgtctatgtattacaaatgtattggcttcctgaagatttgcttgagcaaagaagtaaagaagataagattccatataatttatgggcagaacaaggaatattgagaacaacaccaggtaattcagttcattataaatttgtaacacaatggttcttagaagtcagggatgaattaggtatttatattccgtggatcggttatgatagatggtccgcaaaatattgggtggaggaaatggaaggctactttggtaaagaagcaatgattccagttgcccaagggaaacaaactctttctagccctatgaaattattaggagcagatttagagtctaatttagtaaattacaacaataatagcattgataaatggtgcttatcgaatacagccattgatgtggataaaaacctgaacatacagccgaacaaaacaaataatcagcgtagaagaattgacggaaccgcagcgcttttaaatgcatatgttgtgcttcaagaaaaacgtaatgattacttaaatatgatttgagggaggtgaggaattggggttattcaacaaaatattcggtagaaaacaaccgcctactacgacccgttttgaaatgataaacgataatggagggggctttttctcgtggaatgggaatatctatcaaagtgatattatcagagcctgtatacgtcctaaagccaaggctgttggtaaattaatagcaaagcatatacgagataatgcaaatgaatttaaagtaaatccagagccgtatattagattcattttagaagaaccgaatccattaatgacaggtcaaatattccaagaaaaaatgactgtacagctagagctgaaccataacgcctttgcatatatcaaacgggacgaattaggagttccaattgaaatttatcctttgccatgtgtaacagtagaagttgtagagggagctcaaggtgatatttttcttactttttattttaaaaatgggaagagaatgaccgttccatatgtcgatgttatccaccttagaaaagattttaacgaagatgatttctttggtgaacatccaggtaaagctttatcttccttaatggatattgttacaactaccgatcaaggaattgtgaaagcaattaaaaatagtgcagtggtgaaatggatattaaaattcaaatcggttttaaaacaagaggacattgatgcacaagttcaaaatttcaagaaaaattatttgagtattgataatgaaaacggtggagcagcttcatctgatccgcgctatgatttagaacaagttaaaccagaagcatttgttccagattcaaaacaaatgcaagaaacaacacagagaatttataacttctttaatacaaacgaaaaaatcattcaaagtaaatacaatgaggatgaatggaatgcttactatgaatctgaaattgaaccgttagcaatgcaactttctggggaatttaccaggaagtttttttcacgtagggaacgtggctttgggaacaaaattattttcgaagcagcaagccttcaatatgcttctatgcagactaaaatgaatttagttcaaatggttgatagaggagcaatgacaccgaatgaatggcgttctattctctctgtaggtccaattgaaggtggcgacaagccgattcgaagactagatacagcgttagttaaagacggaaatacaactgttaaagaccaactatgagaagtcaaggggagttttttatataaatagggggtgttttgggtgtttttgcccatccccccgaaaagggggaataaggacaacaatactttattcttccaaggagtcttctcgtgttaagctggtgagaatatcatctttattgatactctcaagaatttcctctatatttactactgttggggatttactaaattcataacgaccataaaaattaatatgttgccatgcaattggtgaaatatactgtaacattttcatctcaaaccctgtatctttggattttattaataaattcgataatatactcgcattgtaataaacaacacagttgctgagcagcctactacattcattccagatgtgctgatcttgttcagtcttgaaacgaagtttcccaaagtttgcataggatactgatcgacgtaatttatgatagctttctccacgatttagtgatttttgaacattttgacgtaacgataatgaatcaatatattctaaaaaatataggcttttaatgatgttatcatactcccatagtgcccgcttggtttgatttttccgtgcataagaacttaattttcgaacaataacattttgagtcgtcgtctttaaagcaagagataccataattcgttttatattgtcccattcttttacaatgagatctgtattaattttacgcacaggtttaatcagcaattcttcataatggcttggatgttgaaaaccatataaatttcgagatatcgttgcttgaatatctttatatctaggtgcaaattggtaaccaaacaaatctaaaatagcaaaattaacttcattcgttccatgtgtatctgtagaatggatagtaggttttatattggttgtattattgtataaaatatcaaatacataatggctttcatgctcatttgcaccaataattcttgcttgaattggaatgtggttagccaccattgtatacgaagtgattcctttattcattccaaaatatttagaagaatgacgagactgtagtgtatgaatctgtgtttcgtatttttggccatcactacttgaatggatgaaatcatcaatgttaaaatacgggaaaataggaagcttacttgtggcattactgatacaatcatttacatcttttaatgtttctaatcgaataaaattagctgatgtagtagctaattttgaaaaatctatatcagagacttctcccattctatataaccccatatttgttccccaagctattaaacatggaatgagagtataatcctttgctttttgattggcatagcgtcccagaatatgttcaaagttatctagaaaattgcattgctgatttacaaaatacaggatactcctcatatcaacttgtggtaatacatcgaaaaaagaatgattaataagagatgaagatcgagtatatggaagtgtccaagaatgatgatttttatgttttttcacttgaacatatttgttttttccagaagtaatccttttattaatagagatgatacgagcttccaatttgttttcaagttcttttaaatgttgttcgatgggctgttgtagcttagttaaattgaaatcttgaatcatactctctttatgtacccacgtatcttcatcgactaaatcatcttcaaaacttctatactgtatgctatctctacaaaaaacatctcctgattgtaagcggtaccataaagaatgataaattaaaaattcatatcgatctattagtaaacgttttgaatgcgcatcatctttcgtgtaaaggtaacgtttggccccattttgtataaaggtttgtggaatattttcgatatcatatttaagtaaagcttttcgtttcataaaaacttcttttaaaaaatgtattgcatccataagaggatcttcaatatctgttgtaacaaaatcaatcgtcataaaaataggacgaatttgtctcttgaattgtaaagctaatgtatcaatacgttcccaacggaacgctttttcatctatcttcgaagtattcaggatttgatttgctagctcagttaatttaggacggtctaggatagaaaatacacgtctttgtatgtctttaaatactgtatgttcggaaatgttttcatctattataacttgtaaaatatttccgactttcttgaaatcttcctggttttctgtgtaatagttatatacttgatcttttgcaaaggataaaatatcatcgttgtattttctcattttataaataaaactattgatcaaattatcattcattctttggtatcgatgaaaaataaagcacaataaataaagatttacaagggattcattaaacctttttaatttatatacggaataatattctactaaagaagcgtaatatttaatactttcattagaaatttttagttgtggcaaaattgaattggccagttgaaaaagaggatacatttctttcccatattcaatttcccgtttaatttcattcatactaaagtctttaggttcatgtttgattcgagtaatcttatataaaccagaaggattatataataattcttttaaatgctgtttatccgcctcggatagctgtttttgtataacccttataaggcggttttgttcatatgtaatagcatttcctataacctcttgtataaagctataaccaggaataataattcgtttagtagttaaataatttataagttcgcgaaaaataaaaatcggtttcccacttatagctgcagctctacgagcttgttcttttaaatctagtcgagattgtgaatcacaaagataataattaaagcgcttaagaataagttgttgttgatttagcctagtttttttatcaatagatccaaaatctgagaagtcagcattattgaaatgaactttaagaatatattgaatatcttcttccacttcacataggttaaattgaaaaaataagtgctttgacttaaagtatccaagttgaagaataaaataaatcttagattttattgaacgtaaagtatataacaattcagtttccatttgagaaagagaaaaatattgtacgcgctctttagttgtaaaaagaggtctactataaagttgatttatttcatctgtagttaaaatagttaatcttttttgaatattcatatttaatcgttttctacatctccttatgaattataattataatagattacaccgtgtcaaaaagtatactttttgacacggtgagtttgagtagtttttaatgtttcacaattataacataattatttttgaaatatgtcatgagagttgtatagaatttgacattaaaatataataattatatcttataaccaacaaatttttataaatatagattgtgtgtgatttgaaatgggggaaggaatacataatgaggaaattcttttatattagagtaagtagtaaagatcaatctatcgagagacaactcgcaaccgcagcagagataagtattcctgaagaatacatctttatagaaagagcaagtggaaaagattttaaacgtcctgaatatcaacttatgaaacgtatgttgagaaacggcgatgttttatatattcaatccttagatcgcttgggaagaaataaacaaatgattttagatgaatggcaagaattaattaaagaaaaaaagattgatatcgttgtgttagatatgccacttcttaacactatgaaatataaagatttaaatggaattgaaactcttatttcagatttaattttacagttattaagctatatggctgaagatgaaagaaaaagaatccgcgaacgacaaaaagaaggaattacaattgcacttcaaaaaggagttaaatttggccgcaaaaaagttgaaattgatgataattttaaagaagcttatcaagaatggaaaaatcataaaattactgcagtagaagcaatgcaaagagtaggcatgaagagtaatacattttatagaagagttaaagaatatgaacataatttggaagaaaagaagctctcttaaatagaaaagcttctttttacatactaccctatttcaagagaaattattaaaagtcaaataaatcccctttaaataatttgatttttcgttattttttgtcagttatgtgttataatgataatgtacatgtaaaatggtttgaaatattagtatagactcattcaggaaaagcgcgttctacaatagaacgtgcttttgtgacctgctaattttccttttgtatgtttaaaaagagacatccactttaagaaacgaagcgctttttcttccttaaaaacatatggaaaatcttcagaaccttcacgctcaatatctcttaaaaatcgtttacacgcttgtttatgcttctgacaagcaacaacttcaccatgtaatacatcatcacagtagtccatcatccattgtctgatcatgttatacgtcaaactccttttctacatttgttttcggaccttgtttactatttggaatgacaattttcgctcttgcactcggtgtaagaccaaactcaacagccaaagccttcatttgttcatgtaactgtttcttctttgtaagtagtggatggggaactttattcgtttcagctgccttattggtatattcaacaagaagtccttcttctcggataattttggtgcattcaacatagtcagagtaagcatcgcaatacgttgctaatgcattcacatctatgtttgtaataacatctagctctagtaattcaccagcaatccgtctaaattctttcttagcaattgaatctaaccacgttggtggttttaccttgtccttttttgcttgtaactgtttttcggcttttaatcgctgctcaatttcatcttttgtcaatcgatttgtattaccttctaataaatgcaaatgaatcggtttcgctttccttcctatgtgaaccacctccctcggctgaacccccttttatggaataaaacgaactttttgcacggaaagctaggcggcggtctccaggaagtcgccttttgctttttcatagtggggggatgcttatgactttttctttcgaattattttttgtttttcttctcatcttcttttgttttcttgttatggcaagcatggcaaagcgtttgtaaattagatggttctaatcgtttcgaccaatcaacacggataggaatgatatgatcgactacatcacctatcttaatgatgtccttacttctacattgaacacataagccatgatctctacgataaataagctcacgcatttccttccacaatcttgagttgtagaatgaacgtgagcttttgtttcgaatatgtttgtcataatattttactgtttctttttccttttggatatgtttagcacaatacttatcccgtgttagttcgttgcaacctaacgacttacacggcttaaatggtttacttggcaccttccatcctcttccttaaccgtttcatttcatcctcgattgccagattatttttattaatccggtcgtgatactttgtaatgtcagcttgatgcttacgaatcttatcgttcacatatgcagcaacatgctcatgaccacaatgtggacagatgtagaaacacttctcaattctttttggaagctgtgctacttgtggttgcatatcgtaatctttattgcagctagaacagtagacttgcatctatcctcactcctttagaaagaatatttcgattatatatttaccaaataaatacaagttgttataataaagttaacattgccatcaggaaaagtgattcgcaccccaagcgagttgcttttcctttttttatggctattgctttaagaattcatccaccgctttttcaagcaaactaatcatcgcttctctcttttgctttggtgttgtattatcttgcatttcattaaagataggaagtactctttctaatttctgtttatcgatgcgttcatttacaaggtcttgtcctagcattgaaatgaatgtaccaattacaaccgcttgttcttgtttagttagtttcatttgttatcacctcaggttaaaacctttctttaatttcagtaaactcactaactttttttgctattgctttaccatttaaaataactggaacttctataaataaagaatcttttttatttgtaagcctacccataaccttttctagcttctctaacgcttccgcacattcatttgcagcttcagtcacttctttaattccttccattgcttcggttgtatcagcgctgacctcaataattaatttgttattagccattttgtgaatcctccccagattgtttggtttatcgttgaacatgagttatatcagctttcgttgctaacgtttcttctagcatattgacttttctattcaatgcttctatattcgttgaaacattaagtaatgcttgtttcataccatcattatctctttgtaaatcgttaacacttctttctaaattagcaattatttttgttatagattccatccttcatcctcctccaaaataaaaagcacccgaatggatgctttttatttactctaaattaatcgctcttaaagcagctaattttttctgattttccattatatacttatgagattgatgtaacgcagttaaaatttctgttctctttgtaacatcaggaacttcaattaaatcaaacgctgttcttgactctgttttaggcttgtcttcttgtgagtcgtaatatgtaatactctcaatttccaaaccaccgggacttaaagccaatttaaataacggagagttatttaaatccccacctccacgagcacggagtacaatttcatgcaaatgactctcgtcactattccacatgtctttccaagattcttcaaattttgtaccatcataaatattagttacagcccaaccatgcttctcgttatatcttaacttcgcacctaatacccttgtcttttcaacaaaatttttgatgaaatactcattacccaggaagagattagtcataatatagttgaactcagcttcaaatacctcttgccaaatggcatctaaaacacctgtgattctagttcttgctgtagttctacttaaattttttggtgagtaatctctttgctgaattaataactttcgatggttaaaatcgattgcaaatattgtacgttcccatggctcaatgttttcaattgatgtttcttctcgatctgcatctattgatgtttgatctggaatatattgttcatgaagtgcacctacaaacaccccattttcataattaaaatctttatttacacaatagcgtaatttgtgctcgcctggaaagaaccccatgctaaccaccttttgaactacctgcttccaaagcatttcatcatttggaagttgaataatttgataaacttttaaattcaaacaaaccaccccttcgttaaaattggaatacatttcaattttaacagaagatggaatgttattaaatataatattaagaatttaaaaaataatcactgtattttccgaaggaatccaaaactctgaaccatctcccattacgactctataatcaacctctcctctatccatctttatatcaacaacttttgccaactctccattatacactccttcatcagaagttataatttccacttcatttggttttattaaattcttcatatttaccctccatattgatattaatagtccattttattcaaaatgaaaaaagatatacactataatgtatatcttttttattagttataatataaagtacatgaagttttacccttcttccgatcacctaatgctgttacattcatttgcgccaacatgattaagtaactggaagaagagcaaaagctctccttcataacggatatcattcaatcattaccatctgctggtttcggattttatgtgccgtcattacgaaccgtttagaaatttaaaaacaacatagtgaattgtgttttccgccacttctcacaatacaaatataacacgataattccaaaacaaccggcacatttcctgccaaaaagcggtcaaaactctgccactttttttatctgcctcatttcaaacgtttccacttcacttgttagttccacctgaactccgagaaacgactgatccaaattcttaattttcttttcaattagccaatcaggataagctaattgctctaatactgctctatagtaatcttggtttaaccttaatgtgttcggcttttctccttgctgcatttgatattgaaccaatgcttgtaataactcttcacacatcatctgttccacctctcattcattctatataacttgtatacgtcatgtgcatattttataccttccaattacccatatgtttaattgtgtgtttgtgtatccaatatcactagcgcataagaggaaatcgattactgcatcgttcatattttctttctcaactagcttagctaaacttacaagattctttttctccgtctctaataaaatccctagagatatcatccaaattagatttaaatatccaacttcattttcccctatatgcctcaaatcaataagagcgttgtcaaaatctccttctattgtatggatagcttctcctagggaatattttgcaataatatcctctaactcataattaaagcttgataagtaggttccttctataatactattattatccttagaatatctttgaattccctttttctcaccttcttctaaacttttaatatcctctttattttcttgaataaactctttattatattcaattccttctctacatttttcttctataattaaataatctctcattctatttgattcctcctatagatattatgattatttagataaaaaaaacagtgataattcctaattagttctgcatcaatcttacttctagctcactagatcccttaccaacattacccttatagatactttaacacaaactaaaaaatccacagtgtaaaaagttgaacactgtggattcttacatttattttccttgataatgcaccatatcataagggtagtataaagtattttttaaacttgaatcatctaattttaaaatctttacgattgctccgctttcgtaactccaataaccattgtagatatcatttttattttcatgtgagtcataccagcctgtatcactatgccccttataccatttcccctctaaatattctttcaattcctttactgattcttctttattctttgcattgatcacatgataaattgatttatatgggtctacaaagataaattctgtggtattcccttcccaattttcatctttataactaaataaaaaatcaatcaaataatcattcaatttctctttttctaccaacttttctaattcaattatataatcttttgaaacatcaagcattatcccaatagaaagaacccacaataaatctacatatctatatttgccactccacccctttttcatcgcctcaattatttcggggtaaaaatctcttagtacttccataggtcttcccattgaatataaacaattaaatttatcaatacaaattgattcaatatatccataagctcttttaatactacctaaatcatttgatctttcattttttacttttattgctaattctttatatttttctattctattattctgtctatttaaataatcctcgaaataatcttcattttttaaaatatctctcatttcattctccttactcaattattttcttcccagaagaatccaaaatgtttttaaccacattaccatccttgtcaacattaattagtatattttgtacattttcaggattcaaaagcatttcttctcgaattttatctgccatttcttctccaacagttgattccaaacgtctagaaccatctatccatatttgacatttgtcgtccatctttagttttccccaattgtgaactaccaaactttgcttcatcaataacatatttgatctttgattctgcatttgcattttcgtataatccatcaattccttttactattttatcatttatgcctgatggtgcactttttccgactggctttaaatcaaatccagcttcttttaaactttgattattcaataaattgtcactagattttatttcaccataattacctttttgcttatttgtagctgtttttgcatcaaaattatctacagttgtatttttgttactgctaggtttaccgttagccgcacctccaccagaagactggattttttgaatagtatccttagtattttgaatcgatttatcccaaacaaatccaccatgtacaaaaagacttgccccagtagctgttgctgctatatctaatggaataacaattggtgacgctaatccgccagttcctacttctgcgacgatcgttaagaaattagatccgcctatgagcgaaatagcttcaaacatttctacaatggacccggctatttaataatattgtccagctttttctaatgtttctttacattgaaaaacatactatataacatcaattgaagcctatgtgcctgtgaaatgcgaggtacgaaagtgcattcgcttaaataataattttcaatttaaatcaacaaaagagacctcaaatgtgaagtctcttttgttgattattttccataagtaactcgccttttatttgtttattttaagacagataacatggttcattcaaatatatatcctaaagaaaaattttttcctgccgtcataatctagtagaatagattcaattaattcttattaattgcgataaactcactaggaatctcatctgctaaccaagctttttcatttcctaaataaaatttaacgccttcttctctagctttttcagtattaacttctaaaataataggatgcttatcttttcttttccccactaattcagcagttacaatatcttcagaaagatggacatattgtctatacataggtgatagcccatttaattcaatagaatttaaaaagcgaggagatgtaccatgataaagaaatttaggtggaacgccttcttcctttactattttcatgggaatagaatgttcatacaacgcacgaattttattttcttttagctcatgccttttttctcagatttctcaatcattatttttaaatcttctatcttcacatctctccattcaatggattggtgaagtgcgtgtaaaagttgctcaacagacacccagccattctcatctaactccaattcgtattcccacggagcatgacgtaaagcataagatacttattcaattaaatttttaaatgattttgattattgtttttttcacttcgattgtaatctatcatttctttcatagcacattcaacccaatcccaaaagtcatcaaattcttttcttcgttcaaaaccttcacaagtaaaatcatgaataaattgaactttacttcctttgtcgatttcaaaacatgcagtatcatcattatcaaatcttttagcaaaaggaatcagcttacgattaggatatcttttcttcataccagagtatatgttagtagcctgttctgattccattaaaaaccatatatcaaaattaactaaatctaatttgactaataaggtaacagtttaaatgccacctattatttacacatttctctttcccatactctttttccgtcagttaaaaacactgcacttggcggatcatcatagagagaaatttcaaccaatgaacttttttcttgttttaaccaattatatacagtaccttcgtttgtattaggtcgagataaaatattatttactctaaatacagctgcatcatattctgtataatttatatcatcctcatctagtccattgtctgtttcaaaaactgtatctagttctccaataatcctcaatccacttttccattctagtatcatgtcactatgttcataatttattaatgttccaattaaagaatcgtaccccattcgcatcctcttttcttatgatttttatggtctggatggtactatatgagcgccatcaagaccataatgaatcaaccctttagtagtctcatggtattcaccagtattgcggtcataatattttcctattggctcaccaaagtctactctttctctaccgttttttaatagttcaccttttcctgcaaacttatcaagcaattcttgtgctattttattatcgccatagaaaatgctcttattttttccatttgctaattcttgtttatagttcggtgtatcaggaatatgcttctcttgagctcctgctttcacttttattggataaccatttacttcacggtatggacctttaggtacagaatcttttccataagaaggtattcgattactcgcacccttacccccaccagaagactggattttttgaatagtatccttagtattttgaatcgatttatcccaaacaaatccaccatgtacaaaaagacttgccccagtagctgttgctgctatatctaggagtaacgggaccaaccggagtaacaggaccaaccggagatacgggaccaatcggagatacgggaccaacaggagtaacgggactaaccggagtaacgggaccaacgggactaacaggagctactggtccaacgggagacactagttcaaggacagcaaactatttatatgtttatgatacaactaatcaattaatttcagtaggaagtgccgttatcttcaatacaacaggacctaaaactggatcagcattgacacatgtagcaggtactgacaatattgtaattaatatggccggaacatatgtagctgaatttaatttaacagcggtacaggcaaatcaattttcttttgcactaaatggtacaccaattccagggggacgatatggtacatctataaaccgtatccaaaccacaggtaatgttgctttcacagttacaactgtcccatctacactaactttggttaacaatacctctacaacaggaactgtaacccttttaaataatggaggaggagctttaaccgcagtgtctgctagtataagtatttttgagataggataaaacaattcattttttattaggagcacggtagcgattccttcttttgagagccaattataaaaaaataattcaaaatattatatattttcatttaggagtctcgccaatccaatgacataaaaaccatgctaagacattttgggaagttaaattcttgattttcgtaagctaaggtttttctaagttataaaaaagataaaaagtttgcatttttttgtagcaaaaatgtttatttttgttacgtaagaggattagaaaaaacgacagcatgtatattagataggtgtaatatatatgctgtcgttttaaaatatgagtttatattagtattcaatacattagctaaatctattattttttacacttccataatgattggaagaagcattggacgacgtcccgtttcagtatataagaatgggcttaacacttctacaagtttttgtttgatttgtgcccaatttatcattccctcatttagtaaagtagatatacattcatatacaatattctctatttttttcatcagttcttcggaacctcgcatatatacaaaccctcttgtaacaattgcgggagatgagactaattgcttttgtttactatctaaattcaaacttataatgataattccttcttcagatagaatcctacgatcacgtaatacaatatttccaatatcacctataccgcttccatcaacatacacaggttgagaaggaatagttctactactgattcttgcttctcttttcgaaatttctaatacttccccgttatccataacaaaacaattttctaaaggaagaccacactccatagctaattccacatgcttttttaacatacgatattctccgtgaataggcataaagtatttcggctttaaaagcgagagcattaatttttgttcttcctgtgcaccatgaccagatgtatgaatatcacttgttttgtgatgaattacatttgcacctactcggtataactgattaacaatcctgttaatgcttaatacatttccaggaatcggagaggaagagagcacaacagtatctccagggataatttgaatgtagcgatggtttccatttccaattcgagataaagctgccattggctccccttgacttcctgtacatataatggttatttgatgacttgcaatatgttttatttcatgtattccaacgaatatgtcgtctggagcttggatataccctaaatcttttcctatttgaattgttttttccatactttttcctacaactacaattttacgattatacaaaatagaagcttttacaacttgttgtaatctatgaacattagatgcaaaagtcgcaaataagatacgtccttgtgcttctgaaaaaatttcttttatggattgtccaacctttttttctgacattgaataaccaggaacctcactatttgtactgtcagacagtaaacacaatacaccttccttcccaaattcagcaatcttgtgtaggtttgcttctgtaccaacaggtgtaaaatcaaatttaaaatcaccagtatgtacaatatttccatttggagtcgttactactatgccaaacgcgtcaggaatactatgtgtagttctgtagaaccggactttcatgttttgaaattcaacctctatttcatctagaatattttttatttcaacatgacggatactatgttcctctaatttgcttttaatgagtgctgcggctaatttcccagcatatattggtacttgtatgcgcttaaataaaaaagggattccaccaatatgatcttcatgtccatgtgtaatgaacagaccttttattttatctttatttctttctaaatacgtgtaatctggtataacgtagtcaattcctaataattctgtttcaggaaatttaaacccagaatcaataataagaatctcatctttgtattcaacaacatacatattttttccgatttctccaagtccacctaaagcaaaaatctttgttttcccaacttgtaatttctccatgttccaactcctttatatctaattataaaaattcctgattttgaaagaacagtcttcaaaatcaggaacagtatgaacgttatatgttatttcacaatcaacacaggatattttaccctttttgctactttgtggcttacactccctaataccatctcttgtaaagcattaagtccgcgactccctaacacgactaaatcaaaattccctttattcgcataatctacaattgttggtccgggttctccgtgtaagattttaatttcgtaagacacacctttcgataacaacttttcttcaatgggcaagagtctcttacggcgtgacaactctaattcttcttttccttgtgcatgaagaacttcgttctttgcttttgaaaaatcaaccacaaatacaatttcaactttacaatcctttattaaagaagcaattttgaccgcttcttgtgttgcacgtaaggaatgctcagagccatcgacagctaataatatttttttatacatggtttccactcctaatactggattaatgagatgaaacttttctattcgtattattatatacagctaatttttctacgagttttttactagaagaatttaaattctgtatagtaacgatgttactgttttcacgatatttaataactaccttatcaatagccccgactgctgaatcatcccaaacatgggtatttgagaagtcaataataatacttctgtttttaacattgaaatcaaatgcatctacaaaactttctactgatgcaaagaataattgaccttctacatcaaatgttatataggagtcaatttgtcgtttcactacttgtatctttgaaattttagcaacaaagaatattgcacttaataaaacaccagcaattacacctttagataagtcgtgcgttgcaactacgataataacggtcactaacataactactgcatcgctttttggtgcttttactaaataagaaaatgaagaccaatcaaatgtaccaattgataccataatcataattcctactagaacaggcattggaatttgtacaactaaatctcctaatacaatgatgagaaacattaaaaatagtcctgcgatcagcgtagacagtctaccacgtccgcctgattttacattgattacagattgcccaatcattgcacaacctgccataccaccaaagaaaccattgataatattggcgattccttgtcctcttgattcttggttcttattgctatcggttcctgtcatatcatctacgatagatgctgttagtaaagactctaataaccctacaattgctaaagcgattgaatatgggaaaataatttgcagcgtctcaaacgtaaatggtacatctggaataaagaacgatggtaatgttcttgtaatcgctcctaagtcaccgactgttcgtaagtctaggtgcataaaaatgatggcagagaggtcacacccgttcccataccgaacacggaagttaagctctctagcgccgatggtagttgggaccttgtccctgtgagagtaggacgtcgccaagcaactttaagacgagtcagaatgactcgtcttttttgtatgctttcatacctctatcaattgcatttttaaccccttctaaataagaaaatccatattttttatctggctctaagtaagttccttccgcccactcgttccatgcgttaataaataaaaactcgctgttataaaaagagtaagtccgatgaatttgcttgcttaaatatatggtgaacttttcaggggtagaacctacaaagatgctgctattcgcgtttttacgtcgtgcagtattatcccaatcaacaaaagcaccaggaaatgtttttttctttgggagcgatcgttgtaatatatacatccatactttatcgtagtcccaaacgtttaattgcatatcagaatcatatattaccttatttatgtctgaagagctatcatgggcaattgtatagaaaggttcaaactgaatgctagcatcgaatccatttatattaggtagtggaaaactgtttaatgtttcagcaaagtatataccttttaaaccattttctcgcgctaatgcattccagtaattaagcattttttcacaatcaggaatatgtcctggacgataaataatgaatagaggtttatcatctatataaatatatctctcatcttggaaagcctgtaataaataatcaaagtgttccttccaatcagatatatctccgtagtcttgaggcattaatatatgtttatcgagaccatcccaagattttgtccatggttcatttgcccaagaaagacaaaaagggaagtcaggttctttcatctttagtacctcattaaagggtgtttctaatagtctttttcctttaaaccagtaatgataataacaaaaaccatatataccgtatgctttagcgatttttgcttgccactttcttacggagggggtagttaagtcgtaataaaaatcttgataaggttccctaggttgataatgtcctgaaaataaaggtcgtgcacttttagtatttgtccattcagtaaatcctttcccccaccatcgatcattttctttaatttgatggaattgtggtaagtaaaaagcgattattttcaagttatatccccctcgtgtttttcgtagttcaagtgttgggaagttattcttgatttggtgaagcaattttaaaataagagatatgttatctgtttactgttttttttatggtatgtattggattttttaagcttacttaataagagagtattaggtaatttgatatatatctgaaatagaaagtacttttcgtcatgaaatttattacgttgaatgaaaggaattaaattttttgaaggacaaagagggcctgtggtaatcgatttacatcatcaaaaaagtcttgtagctttaaatatttctcataatgattttcaatataagtcctaggtataacggtttctccgtaaaaactactatttctagcatcccctgcaccagtagggctatgaacaaatttgccgttttcataatccgagatggcgcgatgtatatctggaaaagcttgagataaagttttatgccatcctgtttgaattaattcaggatgttcttgaaattgttgacaaaaatcaagaaaatagcgcgcttgtgttgttgcgatgaagattccaccagggcgaagaactcttgaaaattcttttacccaattttcggcagttgcttcggataaatgtgagaatacagaataagcgaatatgatatctaatgaattgtcgctaataaaatctacagggggatgtgggcttgctgttttatatatccctcttcctagtgtttcattacaaagtgtgatcatcgcaggatcgacatcaatgccaagtaaattttgatcagaggcatctttaaataagaagcgtataattcttccccatccgcatccgaagtctaaaactttactttctttattcaagggaactcctaaattttgggcgtattcttttatatggctataaaacaaatatgcttcgtaaagagcatgttcataagaagcacctacaaattgtttttgaatttcttcaggaggaaacataggtacgggaaccccatttatcgttgtttgtgaacaactttgtataaataaatttagaagttcggcatcagatagtgaattaacaagatgatcaaaatcacttcctaacttaaagttattcatttgttaaacctccgaattatatagtgattaaactttattttcttgctttttactaatgaaaacatgtaaaaattcagcatctaaccctagtgatctatccttttgtaaaaaaacaattgtatacatgtttgcatgtgtataaatatattcaatcatatcctgcccccaatcgaacgttactaaagatccattctcatcaatagggtttccatgataaatgggctcttcaatatattcaatcacctctttattcattcttgctctttgcacagtttttgtgagtgtatgataccaagggacagtaaatacatgagcaccgccaggttttaatactcgttctatttctttaaaggctttgtttggcgtcattacatgctcaaaaacgtcttgagtaatgaataaatcaaaagattcattttcaaaagtcatgtcttctaagttctcacatctaataccttgaaagtattggccaagaggataatttctaaagtattgagaataagtatagtttttacagttttttaatagtagctgagtcgtaattcctccaggagaggattcgtgaatattataggaatcccattttggaaaaaatgtatgtaaagcatggattaaagctcgctgccttggtatagagttacatgtagaacataaataatgatctctaagccaatcattatgctctataaatgtagctttcttttcgcaaataacgcagtacccattattgtgtttcaaattgatttccacacgatatccctcctatgttaataaatgcaatctatgtatggaaagtatgatacacgtcaacaatcggcgaaattaaaggaaatgggtgaaagttaggtatctcttaaaattacgattaggagaagggaataattagttggagagaactcccactcgaattaaagtttcactttatgctatgcgatgtatcagcttttattcgtggaaaaatgtatagacttaaaatatccctttcgtgtatgggtacatttcaaaatcctgtgcgtatatttctgtaactaaatccatagtttctttatcataaaagctttcgtatgttggaaatcggggaaagcctggatctgtaatgctaagttctgcatagcttcctgcataaatcatcttgtgagcgcgatgatgatctgaatttgtaagaagtgctaaaggggatttcatcaaatcgtacatgtgttccatcttggtgatttgtgtattaaaatcttctaaaggaatatagcattgaatgaaattttcttcaccagggacgtattgttgactaaaatgtatatctaatgatagggaattggaaccgaatgcctgaacgtaatataaaaattgtttaaatgatattccttgattactatatttatcattataaaaataatgacggatgctctcccattgtgggctagcatatggattgtcagcaagtaataaaaatgagctgacagctcttgtataaggatttcgtacaagtttacaaacattttttttagcctctagaagactattttgtaattgttgaatgtaatttgtactgtttttatacacccagaactcatagtaatgaataaagtcattgtatttctttgcttcagtaaataatccaatttgaaaaaagaaccaattagctaatgaggtgcatccgcttctatgactccaaaatagtattataaatgctaacttaaatatgtacattaacgcttgaataaatatgtacatttgttcaatccttagtagctgcttaatatatttgtctaattttttgggttcagttcaataatggtggtcttgtttatattggtgagattgtactaggatgatagaatagatttaactgtatgacgtagggtcggtgctgtcctttctcttttttatgtagagggaaagtaggtgactcctatgatggaatatttactgtctttgctacagaatttattgaaagtatttctaggaattattgttattggttatggaaacaagctagtgagtaatattagcaaaacgcaaaagaacctccctacgccgtcggaagcaaaagggaagttctagaaaaagaaaataaatttatttagtaactacccgccttacggcaatagttaccagaagagatggatccaggcatctcttcttttattatatacccaaggtattactgcaatactactgtagtaataattatatctaatgaacataaaaaatcattgtgtaaacaatgggtgtaatggacaaaagaaaagacaccctaaggtgccttcttccgacttgagcaatcctatagtaatgcgatgtcgattaataaaataatttatataaataattcgctatatctttatgtaccctagctgatataatttataaggaaattattggctaattaataacgcacacatatattagggaggtacataagtcatggaattaataatttcttcatttgtattagtagtaatattctttattctttcgatagttttaagtggtaaaggtcagcgaatagcaaaagaagttttaaaagagcttattaatggtcctgaggggaaaatgttggtaggtttttttggatctgcagcagttacaggagtaatttttgtcatttggcttctattaaattaagcattccagttactcagtctgatacaaggtgtaagaaaattactggataattaaaggtacataagccatgttagaggtaattacggcatttttcttactaatcctccattccattgtttatctcttttcaagtggagaaactaagcaaatagcaaaaaaacatataaaagaaattcttaatagtccggatggagtaataatattaattgttgctgcggcacttttaatcggggggatatatttattatcactatgatttcaaataccttagcttaaaacgtataaggaaattaaaagtatacaaatagcacaattataaataatgatatttataattgtgctatttttcatatttatcatatctattattctttcattattttcaaaaggtgaaactcaacaagaagcaaaagaagttgtaaacgacattgttactggttctaatgggaagatactattaatcgttgctgtggtatttgtaattagagggatatttattgttggtagtattgtaaatgatggctatgaatcacctaaaaatccaagtatgcgaaacgatcgtacacctttaaattgtgctcattatggtggagaatgggacaccggtggtctttttggagaagctaaatgtgtttataataaaacttatgaatcggataataaataatatataaaggccttatcttttctataggaagatgaggattttttatgcataaaaaagacacctaaggtgcctttttctaatgtgtttacatccttaattgattgtaaattgatttgaatacgtgaattcaccacgatatttaattacagcgacataattaccacttgtatagctatctgtgataggtgtttgccaaatttctgttccaggaataaattctggttctattgtttggaatcgttctagggtaccatttgtgtggattttataaatttccatttgcgcaccaaaatgttccctaccaaagtgctgtgttaagtaaaatgtatcaccagttattaaattcccaatcttccaatcaggttggtatgtactttcctctgaattttgtaaatccataatggttttgaatccccaatcatcattaagtggatctgagtaagctgcagctgcttgtgaggtaggcttactcatttctactgcagtaaacccactaaatgttaacgctccaattaatgctatttttcctaatttcattgttgtttccccctgccaaatttcagaattatttaaaatcatatacaaacaataatataattcgttgtattatatttcaaatattttctaaaaaaatccagaataaaaagacaccctaaggtgccttcctcttacttatgaatcaaatttatattttgttcactttattcagtatggtgatgatggtctttgtatagcaatagaaccaaatcacgctataagcattagcggacatcaaaacattcaaaatcggtcttttatgtccgctaatacttaacgtaagttttggttccgttgctacacagacgactatatcctctctactgactgtggttgcattttcaaacaacaaaattataaaatctatttatataatcttaatgatctaaattcctcgtattccctcattctcttgcaaaatgtcgctttcttcatgccagccttatccatgtactcaacagcgttgatctttcctaccttccattccttactatcctcttgcatgtaccaaacattagaattgaaacctttgagattactgttcccttaactacaaagaaaacgctaaacttcatatatacttctgagtatgttatgtaatactaattggtttttatgataattattcgtaagtggataattcactacgcgcctcttctattgtatccctagcaattcttaacgattttaaacatttgtctaatttcgctaaatctgtttggctcgcagcatctccatagttgtctataacaaattgcaagttatccatcgcctttaaaatagatgaatgtagaccctttaattctgttgggggttctacatatcgtacacttgagatgagataagacattttatagaaaacatcgcctacttctgaaacccacgatttgtttatagtccccttaatttctgcatcagcctctaaaattctaaatcgggtcgccacatcagataggtcctttaaataatcatccattacccatgcataatgctgcttgtctaaatgtttataatcacttgtttcggctccttgctttacttctttttgatttcctatattttttttatccgcagtgaattcctcaactgctgctgtaatggtttttataccttttttgctaccaacaagagcgtcgatagttaaaatactacagataaaaatcacaaacatggcaatccacttagcccatttcagcataaaaaaactccttacttaatatatttctcctaaattataatacaggattaacgttcattataaacaacatgtctctttacctaataccttaccttctgtttttccaaaatcgacatctttaagtaaatctatatcatgtcaaaaacgatgtttaaatattgtatcattaaattaaaatataacactataatattttcctatcaagaatatttttccaaaccaaaatcattcatagactcttcttttcaccattaaacctaatttatacatattgaactacccccactttcacttcgtttagaagtgagggattcctaagtaaagagttctatcgaactctaattgattaggctaaccccgcagtccttgcggttagaagccttatcgcttcattctttagattgatacttgcgttaatatccctatcatgatgtgtacgacaagaaggacagtcccattcacgtaggtttagatttttaacgtctttattttgatatccacaacaagaacataattggctggaagcaaatgttttcgatacgacaatgacttgtttgccataccattttgctttgtattctaacatggatcgaaattgcgacctcttaaaattggtaagacgatatggcgagatattagtaacggtaaacctggtgttctaaaagtgtggaacggtaaaggttgggagcttcttattcctgatgtggaatcaattaaaaaagatacactagagcaggttaataaggatattcaacttacaaaagaagaattaaataagaaagtggaagaagcgcaaaatgaaactgctggtcaattcaaggaagtaacagaaaaccttcaagaagtttctttaactattaaaaatgtacaaaactctcaaggtgaaattgacaaaactgtctctgaaatgaaacaaaccaacgaaggttttactaaatctattgactcgttaacgaaaaaaaacggtgagatcactgagaaattaaatacagtagtagagacttccgatggcacaataaagaaaatctctgaggtacagaaaacaacaaatgatctaaagaaaacaactactgaaatagaagaaaaagctggggaaatcatcgaaaagttaactagtgtagaaaagaaagttgataatacggaaattggtatccgaaatctattactagaaacagctactaaatcccattcagtgaagactggagaaaataagcctcatacctattttggtgtagctaaggatgcggttactttaattcagggcaagaatattgctatgagttttttatttacaggtaaggttactgcatggggtacaacgaataaatgggttggtttcgaagtgaaaattacttttacagacaatacatttgcttatcctagctgccgtgtagaaaaccgtctaacactaggtaaacagtataaacaggaaagatttacagcgagtgctgtagtaatggataagcctattaaagagattttagtttacgctttaggacgtgatttcacaggagacgtgttaattgaaaagcctaaattagaagttggcacagtacctaccgcatggacaccggcaccagaagaccaagtaacgaatgaggaattcaacaagaaaacaaccgagattgagaaaagtgtggatggaatcaaagaaagtatcaaaacggtagaaaaaacacaagttgattttagcgagcgtgttactactgtagagaaaacagcagatggtattaaagaaaatgttactagtatacaagaaatacaaaccaaacaaggtacgcaattacaagaagctaaagcgggttgggaaactactgcaaaagctctggaaggaaaagtagaaataaaagatgttgagaattatgtaggtggtttaggtactgtaaacgagttgcgtgatgctgattttaagttaggacagaaatattggttttggaatagtggtaatggggctactggttctgttgatacgaatctaaaatacaaaggcatgaatacctttgcaattaccgttactggccagactcaagatcgttggtggggacttacaagtcaatttattgagtgtcaggttaacgaagactttgttgcatcaggttatttcaatactgacgggaaaacacctattgatggtggcggtgcatttattgaaattgaatggtggactgctgacaaaaaaactcgcattaaaacagctagaacgaatatcaaggttgtaaatcatacatggattcgtgctgtatgtacagataaagcgccagccaatgcagcgtttgtgagatggcgttattacgttacaagaaatgggcgtttatggtgtgccgcaccaatgttacaacgtggcactatagctacagaattttggttacatccgaaagatcaaacggatgctgacaaaatgatagaagatattgctaatagggtagcaactaaagattacgataaaaaagtaaccgaattagaaagaagtatcgctactaatgaagaaggcgttactatcatttccaaaaaacaggaaagttttattaatgagacctataatgcctatgtaaagaaaacagaatcgaagttacaggtattagatgaagggatcttagcacaaattttaaaagacggtattattacttctattaatatgtcacctggtaagattacaatcgatgctgagaaactgaatattaatgctgatacaatggtgaaatggttaactgcaaaaggcattgatacgaatcttattagaattgatggtgataagataaccattgataaagatggtgtaactgttaaaatgctagacttcctattccaagacgaatggggcacaaaaacaactgcagtatcaagacgaaacctaatagcagatcccgacttttctagtgttacaaagaaaaacattggacataacgattattatggatttgaaggtggatacggtcttacttggaagtcctggggaaatgtcgtaatagaaaagaatacacatatatttgattacgagcaaatggtgaatgccgcaagggtagatatgtataactatccagaagcaatcgtgaataacggtatacatcctggtaacgaatatacagcatcagctcattttagaactgctatgataaatggcgtgcgtaagacaggaaaaccgagaatacacgtatgctgcgttaaattcggagataacgtaagttacgacatattgagtgaacaaaagatggacttccctgagccatctacctattatggagaaatcagaaggtattcttttactttcaaagtgccaacaaactatattccgcaacaacacgcattgattattaaagtttgttctggaaatgctgacatgagacaagggacagcgatttgtgtaagtggtgtaacgctatacagtggcaaatatgcatctatgtataattgggatcgtgctgcagcagaaagagcagatggtattcagccgtttaacgcacttgctgtaggtggtgtgaataataatatatctccagcaccagacggacaaacgtttgatataagtactgaaaaagaagttaaaatctttaggaatatacgagcaatgcagggaattaacttaggtggcggtggattccaacagtggggtcatattcgttttacagacggtaatgctggaccgggtttttatgcgagtactccaagtggttggaaatttaacgcacttggatagaaaggaaggattaaacatggatattaactatatgatgccttttcaagaaggtgaaacgcttccttatatgggaagaatagtagacgtaaaacgaacggaaacaggagtctttatacaagtacctgctgacatgttagataatgcaggggtttccaatgatacgagtaaagttgaggtgtggagggaaatgtctgacggaactattggttttagggttttaacgaaatgtgagttatgtggttgtggagccaaattatatgaattgaacttaggagttgttaaacggaacatttgtgcaaatgattattttaaacttacaggtgaatatcctccacaagaaccgccaacaccaactaatgaaaataacacagaaacagagcaggagcagcaatagctggtctttttttattgcctaaaaaggaggggaattatgacagttgaaattggattaattatcgcaatcgcatcagcattaattgggtatttttcttattcgctgaaccgctcaaaagaaattaaatcagatggtcagcaaggggcagaattgaaagcgaaattagaatacatcagtaaaggtgttgacgatattcgcatagatcaaaaggcaagtgaaaaacaaatgattttatttggagaaagaattacaagagtagaggaaagttctaaacaagcacataaacgtattgataccttagaaaaggagataaattaattatgacaaaagagaatataaaaaaacgattccgcaactggaaaacatgggttgcggttttttctttgcttggataacaagagaataaaactgagaacactgttcagggatacacatcaggtattagacagtacataaaatggtttgaaggttcctatgacagaaaattaacaaaattgtaccgacaaaatatcttagagtacattagttatttaaagaatgtcaaaatgttgaacgccaagtccattaaccacaagattagtagccttgctaaatttaatgaatttctaatacagaaaggaagtcaacaagatcaagtaattttaaaaacagacatgataaaggttcaaactgtctatgcttctccaacccaaattgttgaattagatgtaaaaaagtttttacaaagtgtgttagaggataataacaaacgtaattatgcaattgccactctcctagcatatacaggagtacgtatttcagaggcattatctatcaaaatgaatgacttcaatttacagactggggaatgtattattcgaagtggaaaaggaggtaaacaacgaattgtattactaaatagtaaggtacttagtgctatcaaagattatctcatcgatcgaaaaacatacagtacagcacatgaatctccgtatctttttattagtaaaaagcgagaaaagctcgaccgtacggtcgtcaatcgtatctttaaatcatacagcaatgttattactccacaccaattacgacacttcttctgtacgaatgcaattgaaaaaggatttagcattcatgaagttgcaaatcaagctgggcactctaacatccatacgacactactttacacaaatccaaaccaactgcagctaaaaaataaaatggagctcttataaaggagtaaaggggaaacaatgggagttaaacaattactgtcagaggcacaacgaaatgagttaatggatttatcacgtttaacagaatgggatttggtaacatttcatactttttctaaacatgacttacatttaatattaaaacaccgtagaggatacaatcgtttagggttcgctcttcagcttgcattaattcgttatcctggctggtccttaacagaatataaagacattccacaatatgtagtggcttacgttgcgagtcagttacagattccacctgaagaatttttagtatatgccaaacgtgggaatactttatgggagcatcttggggaaattcgaacagaatatggatatcagaatttttcttctgaatataaagaaactttattacaatttttagtgcaacaagcaatggataacaataataccctctatttaattgaaataacaatatctacattgcgaaaaatgaaagtcattcttccagctatgtatgtgattgaagatatcgtctgggaagcaaagcaacaagcagatcagaaagtgtatagtatactacatgacggtttggtccaagaacaaaaagatcaattagatgcgttacttttaccaactataaatggtaaatctccattagcatggctaaaagatgtaccggcccagccttcaccagaatcatttttaaaagtaatagaccgattacaatttgttcaaaaaattggtcttactattgataccacaaaaattaatacaaatcgtcttcggcagctcgctagattaggatcaaaatatgagccatatgcttttagacgattcaatgaagtaaaaagatatagtatgttagtctcatttttattggagattacacaagaccttatagattacgcaattgaaattcatgatcgtcttatgatgaatcttcaaacaaaagggaaaaaagaacaagacgaaatacagcaagcaaatgggaaaaaattaaacgagaagattttacaatttattactgtatgcgggacactaattgaggcaaaagaaacgggtaaagatgcttttgcagccctagatgaagtaatgtcatggaatgagatggtcgaatctgttgaagaagcaaaacaactatcacggcctttaaattatgactatttggatttgttaaatactcgttattcctatgttagacgatatgcacctactttattacgcagtcttcattttagagcgacgaaatctggagaacccgttttacaagcacttgatacgattcatgaattgaatgaaacaggtaaacgaaaagtgcctcatggcgctcccttacactttgtatctaaccgttggcaaaaacatgtatatgatgatgacggaaacattaatcggcactattatgaattggcagctttaaccgagttaagaaatcatattcgttcaggagatatttttgtatcaggcagtagacatcataaggcatttgatgattatcttataccgtatgatgaatggaacgaagtttcaaacattccaaatggccttacagcccctttaaaagctgaagattatataactgaccgaataaaccgattaaatgaacatttagaatggttatcaaaaaatagcgagaaattagaaggagtagatattagtcaaggaaaactacatgttgagcgattggatagaggaactccagaagaagcaaaagcatttagtaaacttcttcatagtatgttacccagaataaaactgacagatttactaatagaagtggccagttggactggatttcatgatcaatttatccacgcctctaccaatcaatctcctgatcaagaggaacagaatattgtattagctactttgatggcaatggggacaaatataggtcttacaaaaatggcggaagctacccctggaatctcctatagacaaatggcaaatgcttcacaatggagaatgtatgatgatgcaatggttcgcgctcaatctattctcgtgaatttccaaaaggaacaaaagttatcatcctattggggagatgggacaacttcttcttctgatggtatgcgtttatccattgctgtacgttctctacatgcagattccaatccacactatggaacgggaaaaggtggaaccatttatcgatttgtaagtgatcagctatctgcctatcatgtgaaagtcattactaccaatgcacgagatgctcttcatgtattagatgggcttcttcatcatgaaacagatttaaaaattgaagaacattacacagatacagctggatatacagatcaagttttcgctttaacacacttgttgggatttcgatttgctcctcgtattcgtgatttggcagatactaagcttttttctatacctggtggagaagaatatgaaaatgttcaagcacttttaaaaggaaaaattaatgtaaagttaataaaagaaaactatgaagatattagaaggttggcatactcggttcaaacaggaaaagtatctagcgctcttatcatggggaagctcggatcatatgcaagacaaaataaactcgcaacagcacttggagaaatgggacgaatcgagaaaaccctctttacgctggattacatatctaataaagccgtaaggagacgggttcaaaaaggtttaaataaaggagaagcaatcaatgcattagctagaattatattttttggacaacgtggagaatttagagaacgtgctctccaagaccagttacaaagagctagtgcactaaacataattattaacgctataagtgtgtggaacactgtatatatggaaaaagccgtagaagaattaaaagcaagaggagaatttagagaagatttaatgccatatgcgtggccgttaggatgggaacatatcaattttcttggagaatacaaatttgaaggattacatgacactgggcaaatgaatttacgtcctttacgtataaaagagccgttttattcttaatataacggctctttttatagaaaaaatccttagcgtggtttttttccgaaatgctggcggtacccccctttgataactaaaaattcttttgtttttcagttgacatactaccgcaggtcttttttatttcattataaaaattcttttacatttaaattcattattcattttgtccatgctacaaagtaaaatccgtcattataattttatctcgaattcgagatattaatcacaaaattacgtatcggcgtctaacctattgaattatctcgaattcaagataattcacaaaaaatatttgttcgatttataaccataataaattttcattatgaacattatttatctcgaactcaagatttattataagttacttattttttattgtcaataagtccttactttcatttttcttgttttcacttatggttccctaccttaacaaacattttttgttctttcaagtgaacgagcacttttcattacatgtgaaaacctttataaacgcctttatcccagtggattacaatgatttttcaaggaattaaagtaataatattcagaagattaaagagtgttttttcacaccttattttcattcctttacccgataaattttaaaaactaaaagccatacaaatgtatgacttttagcttattgacgtctcaaattttgctttctctacatatactttacgaaatttcatatagcatccaatacgccaaggtactatataacaaaccgcaagagtgtagaaaagaatgccgattgactttggatctagaccttgtaaatgtcttctaaaataagcacgtaaaagaacgataactaaaaatgtagcaataaaagcgatacttttttttgcataaatttgaccatcttctctgacttcatacccacttaaaataataagtggaattgacaataacagtccgatcccagcagctataccaatttgccaaccagcaagttgtatcggtgctgcgtataaagaaaaacctggtaataagaagaataatggcaatagtagtcgtcttcctttattattaattggtcgattcatagagcgcatgcgtctaaatataacgagccctatgacgagtaaaaaaattgtaatactgtacgaaccttgctgcaagtgaatctctccctaaaaatagtcattttcaaaaatactcccctattatactcctaatttttccaaaaatataattattcctctaaaaaatcttacacatcaaatatacttttaggtttgatttactataggaaacaattccgaaagaggaactactctccccacctcgtctttaaacacaatatgctctctagttaaatggcgcgggctcttcactcccgccgctgccgctaatgaaaataaactatatctcatactaataatataattcatgactcgccacttcttctcatacggatctaacgctttttgataatgcggattcgtcgtggctacaccagatggacattgaccagaattacattgaagggccataatacagccacttgccatcaaaaacccacgggctgaacttacagcatccgccccaatcgctaaagcaatcgccactttatctggtgtgattaatttacccgatgcaaatactttaaacttgttacggacaccataatggtttgctgtatcaataaatgtaagtaatgctggaataagcggcagtcccatacaatctgccatcgatttatacgttgcccctgacccgccttctgaaccgtcgattgtaataaaatctgggtaaatgtttagttctttcattgtttttattaaatcttccaaaggctcctgctgaccaattacaattttcattccaactggtttaccgctgttttcttgcaactgttgaataaaacaaagtgtatccgctgcattctttaaaaatgaaaatcgattcggtgaattaatcgtctctccctttcggacgttgcgaacaaaagcaattttctcatttactttttgtccctctaaatgaccaccacgtattttagcaccttgcccaaatttcaattcgaatgctctaatattactttctttcgctttctccatgaattttcccattgaaaaattaccgtcttcatcacggtatccaaataaccctggaccaatttgcgcaacgatactcgctcctgtatgtaaatgttctggaataacgccaccttcacccgtattaatccacgatccgcctgccatttttgctccaaaaccactcgctaaaatataattttctccaatcgcaccgtaagaagtcgcagatgcaccaaacatgccatgtagcttccacggatatttacggttctcaccgactataattgcatcatcttcttcgtacagccaaagattcgttgtatccgctgtcaatttttctcttcttgaaaataacccttctttatgaatcacgtactttttaccttcccgctcttgcgtgagattcacacttaattcctcagttaatatcggaaataatgtattagcaatataatatccagaagcttcaaaatctcgttttgatccaaaaccaagtatttcagagcgatatttcgctaaaaacataacactttgaaaatcataacgtgagaaaggctttccatccgtatcatgatcaaaccaatattgtcgaaattcaggccctatcttttccagtaagtagcgcattcttcctaagtacggatgtaattttaaaatagaatggtgtgttcgtttttttataaaaaatgtaatgataaaaaagacgattaaaagcaacattaaaaatagtaatatactaataataacgagtagcgtttcactcatcccgcttccccctatgaaattccataataaaaggagaacactcgatgtgctctccttttatctttattcatactaacgtagcaagatgctctttcgcgtcatattcaactaaactttcagcgtgtttaattcgatgaacaaagtctggattagcaattaacggtcttccgaatgccgctacatcaatcgttccttcttgcaacgcttcttcggcctctttcggatttaaattaccaaccccaacaatcgtaccatcccaatattttcttactagttgatgaaaattctttccgtcagcaatctcttgcgtataattcatcgttgaaggatggatcatcgttaacccaacctctttaaacatatttatgaacgtttcaattgcaaactcaggattttcccacatataagtaggattatcacctttgaaagcagagaaacgaagaagtgttttattagctccaacagcttctattacagccgccgttacttctttcataaacgttaacctttgttttaaatcaccgccatatttatctgttcgcttattcgcaaactcatacgtaaattgatcgattaaatatccgtgtgcaccgtgaatttctactccatcaaatccagcttcgatcgcatttttcgcagcttgtgcgtattgaccgatcacttcttgtatttcttctaacgtcattgcttctggcgtatcaaacggtttacgaaagcgtggaacatttccctctgcagcgatagccgatggtgcttgtggcatttgaccaccaattatttcatgatgactcatacgcccaacatgccatatttgagcaataatcgtcccgccttctttatgtactgcctctgtaacaggtttccaagaatcgatttgttcttgtgtataaatacctggtactcctgggtttccttttgctctcggactaatgacaattccttctgtaataattagtccaattccatccgcagcacgttttgttagtgataggtaaggatttgaagttatctctaccttttcccccactccacacgatcagaatgtggaaagaaggcaaaagaagcttcaccttggtcaaagttggttattccatcaagagaagaaatgatgcagcgcaggaagttaacttatatagcaaattagtttgaattcataaatctttaattaaggagagatggggaatgaagttacaaattgatgaaaagaatgtagctactggtcaatgggttgtatgcgaattgaaggataacaaagttattacacaagtgaaacgagtgattaaggatacttttaacgacaaagtagagttatggggatcgtggggatgcgaaggagcgatacatagtgattggggctacaatcattcgaataaatgtagatatgcaacagtagaagaaatcgatgcagaaagcgtaagacgtgtatttgctcaaaaaggacgtaagccgaacgaatatcgttctggtgatgttgtaacggatgaggtgtatgcatctcgtgttttacacgtaacaggtgatagagcaactgtacaaatcatgaactcgcatcaaatatatgaggttgcaacagataatttagaaattctatttttcgctgaagatatggctggataaagcaagtgaataaatagtttgcttgatctcaaataaaggataaggggattaatttaaaatgcgatatgcaagaggcactcaatatggtttatatgcatgcaagggtaacaataaagattacaaatggtttaaaaaagctaggaaaggtatgggaaatataactattaaagagaacaaaacgttatggccatacaaagaaaaaattgatccaacgtttaagtgggacagaatgatgggaagagtttgttggtcatttgcgaatggggatacggaaactaccatgtttgcactcttaaaatatacaaaaataccacgctggattgctgtgaagctaaaaagaaaggagtgatgcaatgttctcgttatttgtaggaattatagtgtgtatcatggtgttgtcatttttatggattatagctggtaaattaggagtttttgagtgtattggaaacgtagtattaaaaattaaaaacatgtttaaggaggaagaataaaatgaatacaaagaaaatcgtaggtgcagcagtagtaggtttcagtcttttaacaggtggaattctaacagcaatgagtgtgaaggtaatcgatcagggggacatgcaggggttgtttataacagaagtacaggaattgaaaaggaaaccttaggacaaggatggcatttagtttcaccatttaaacgtgtaacagcttatcctatttcaacagaaacggttaaagtggataaattcagcgtacaaaccaaagatggtaagccattaacagtgagtctatcttatgattacatgaatgatgcagagaaacttcctaagatttataacaagttcaaaggacaagctccagatgtgattgagaacgggtggttgcagactcgacttaagaaagctacattgaacgttttctctaactattcagttcttgaggtattccaacatcaaggggagattaatggagcgatagaaaaggaatttagaaaaatggtagatactactgggttcttagtagattccgttacgttagaagcacctaaaccagacgcaaatacagcgaaagcgattcaaggagtagtagacgctcaacaaaaccttgaaaaagcagagattgagaaaaagcaagctacaattaatgcagagaaagccattgaggaagcaagaggaaaagctgaagcgaatgagattattaagaagtctttaacgccagaaattgtagaaattaaaaagatagaaaaatgggatggtaagttaccacaagtgagtggagaagctaatccattggttcaagttaaataattatatttccaggactttcttaaatgagggagtcctgggttgttatcaaatttgaattttattaaaaagggagagataggaaatgggaaaagtagaaatcacagtagaagaaagaattaaaaggaaaatattttatgattttatattgccagatcatgtatcggaaaatcaaatgaacatcataattgcccgtgtagaaagtcgttcggactgtgctgatgatgttgtacatttgttgcaaaaagaaatacctgggttaaaagtgagaaaagtagaagaaacagacttgaattttgatgatgctgaaatagttggttatgacataagagaaaactaaaccaaagcgttatttgaatagaaagggagaaaaaaatgaaaacatctaaatttcagtttaatagaaatccaattcgtgttcttgagtatagagagattgagcaaccaagtattgatgtattaaagaatacaccagcattatggaatgcttcattagatgatgcactgaaatatggaggagagcttacaaaggctgctattggagcgatgaatttacgacatgaccgcaagtatattgttgtagatacaaaagttcatatgttaatgcctggtatgtgtccggcgattcctaattggcatagtgacggtgttccaagaggttcggaattacgaccggaagcaaaagcaaatccacatatattcgcgcaagaaaaaatgagcactagccgttttcatctacttgttacaggtgaagggtgcttaactgaatttattggacaacctgtagagctagatgtacctgctgaaccaaacacaaggctatacggtatggtgaaccaacaagtaagagaaaaagtcgcatcgggcgaattagaggcatttacagtacctgcatgtacaccagttgagtttgattggtttgatattcatcgtggagtcgaagcaactaaacatgaatggagatatttaattcgggtgacagaaacggatcatatgccaccgcaaacagacttacgtcaaattattagaacacagcaacaagtgtatgtaccaactgattttggttggtaatgagatttatacaaaattcttattttagaaaaaggtgagacagaatgataaagataagtaaatctgaagattttgaagaaaaactacgtcggcacaataaacgaatggaagaagatgaattatatagagaagcaacaaaaatgcttacatttcctgctggtcataagcttgaattggtgattgaggtaacggatgagtattatagtcataatttacataacttgcttaggggaaatatagaaggtgctgaattgctgggatttaaggtaactgagcttgtaattaaacccgaagcaagaaagaagaacgcggtaagagagttcttaagccaggtagtacaagattataatttgtaaaaaataattattttagtggaaagagacggtgtatcatgggttacgcaaatagaggaatgttatttgagcttttattaaacaatacatgccgtatgtataaagcggcgaatgtaggagtatttaataagcgccctacaccaataaaagtgataaagacagataagaaaggcaatataactaaaagtgcatgggaaagtaaatctacagtagattatgacggtgtgtacaaaggaagagctgtttattttgaagcgaaatctactgaaaaaaccacaagcttcccgttagataatataagtagacatcaaattgactatttaaaggatacacaagaacagggagcaatttgtttctttttaatagagttcagaacggatcaggttatttattttgttcctgtttcggtagtagcagaatactatgaagctatgctttatgatggaggaagaaagtctattccaagagaggaatttgagaaaagagcgtatatagtacattgggatgacaaaaggcattgggaactgaaaaacaatgttgatatgttggattttgctgtctttgatggaacaactcattcggctacgttacaacaacaaaatcttgttctaaaagaagttcgcgatggaagagttgtaccatatgtcattacagaaacagagaagaattcagataaacgatccattaccacatatgcttcaggagcttgggttcaaattgctaaatcaggcattataaaaccacaaaggatagaaggtaaaacagtaaacgaatttatcgatatggctcttgtaggcatgaaatggaaacgtggaaaaacagattatgcaggattccatacgatgaccattgatgaatttatggatccgttaacctttttgaagaaaatagcttctttgttcaaattagaaattcaatatcgtgttgaggttcaagggtcacaaatagttggatggtatgtcgatatgattcaaaggcgtggccgagacactggcaaagaaatagagttaggtaaagatttgataggtgttacacgtattgaacattcaagagatatttgtacagcgttagttggatttgtgaaaggtgaaggcgacaatgtaattaccatcgaaagtatcaacaggggacttccgtatattgttgataatgatgcatttcaacgatggaacgaacgtggtaagcataagtttggtttttatacgccagaaacagaagagttaaatatgacgccacaacgtttaatgacgttaatggaaatagaactgaaaaaacgtattaattcttcagtttcgtatgaagtagaggcacaatcaatcggtcgaattttcggactagcgcatgaactaatcaatgaaggagatacaatccgaatcaaagatacaggcttcacacctaagttatacctggaagcacgtgtaattgccggtgatgaatcttttacggatcctacacaagataaatatgtgtttggtgattatcgtgaaattactgatccgaacgaagaattacgaaaaatttacaatcgaatccttagtaaattcggcgagaaacaagaaatgctggatcagctagataaattggtgaaagaagcgaatgaaacagcaagtaacgctaagaaagaatcagaagcagcgaaaacacttgccgaaaaggtacaagagaatattaaaaataatactgttgaaattatagaagctaagaatccaccgacaacaggtcttaaacctaataaaacgctttggcgtgatattagtaacggaaagcccggcattttaaaaatatggacaggtacagcttgggaatcggttgtaccagatgttgaatcagttaagaaagaaacacttgagcaggttaataaaaatattgaggtcacaaaaacagaattaaaccaaaaggtacaagaagcacagaatcaagctacaggacaatttaataaagtacaggaaggtttacaaggtgtcagtcgtacaatttctaatatcgaaaataaacaaggtgaaatcgataagaaagtaactcagtttgaacaggattctaatggatttaaaacttctattgaatcgttaacgaaaaaagatactgacattagcaataaattaaatacagttgaaacaactgtagaaggtacaaagaagagtatttctgatgtgcaacaaacaacaagtgaactaaagaaaacaactactgaaatagaagaaaaagctgggaaaatcagtgagaagttgacgagtgtagaaacaaaggttaatagtgataaagctggtggacgtaaccttttattaaaatcaaatgttaaatatgaaaaaacagactatctaatcaatcaatatactctaactgaaaattcctttgcgggtgaagaatatacctttgtaattaaagggagtgtcccacaaggacagaaatttggaatttggcagaatggtgggtctagcaatgttggatatgcaacaagtgtttacgcgaatggaataacgtatgtaaccttcaaagcagttgcagctacaagtggaaatgaacgaaagttaagcttatataactatccgagtagcactacgaaatctattgtggaatgggttgccttgtataaagggaataagccgcaagattggacagcgccgcctgaagaacaggtaacaacggatgaattcacccagaaaacaattgaaattacaaaaagtgtggatggaattaaagaaacaatcacaaaagtggaaaataatcaaaatggttttgataaacgtgttgctactgtagaaaaagatgcaactaccattaaacaaaatgtctcattaatacaaaatacgcagacagaacaaggaagacaattacaagaggcgaaagctggttgggaaaatactgcgaaagcactgcaaggtaaagttgagctgaaacaagtagaggattatgttgctgggtttaagatacctgagttgaagcaaacagttgataaaaataaacaagacttattgggcgaattagctaataaacttgcaacggaacaatttaatcagaaaatgactatgatcgacaaccgtttcactataaatgaagagggtatcaatgccgcagcaaaaaagaaagaagtatacacaatagagcaagcaaatggacaatttgcaaaagattcttatgtaagagatatggaaacccgtcttcagttaactgaaaagggcgttagtctatctgtaaaagagaacgatgtaattgcagcatttaatatgagcaaagaaaacattacgttgaatgcgaacagaattaacttagtaggtttcattacagcaaatcatattaaaggaaaagttttagaaggggtaacgcttaaaacaagtggaaacagatttgttgaaataaataagcaagacatgaagattttcgatttagataagccacgtggctatataggatttatggaaacagatgatggaagtattcaaccttcattagtccttggttctgataatagaaaatacgctggtacaggatcgttttatatttatcaagtcatgccacgaattaatggagtcgatcaaccttctaaagcgtatgcgaaatttgggatttctaaaggagaaaatgcagaaggcaccaatatatggtcatcatatattcaaatgcagaatgacggtggacatctgtatgcatatgcagctggaagattatactttgataatttgaatgacattgtttttaactcagtgggatgggctccaggatacggaaagtttatagtgacaaccacagagccacattattttaaaaatgactatggtgagtttcattttgatagaaaaagtactggtaacagtatatactttgccaatggcgttaatgatcatgatttaaacatgggaagattaatgctaagagcgagtcttgtatcaggctatgatatgaatttacaaattaaagatgtgtatggtaatggatggcgagatatagagttaagaacactgcgagctaaagaaaatatatctgctacaggacgtatgtgggcgcaagaatttatccctaattcttctcgtacgcttaaaacggacatagaagaccttccattctctgctttagataaaatcaactctgtaaacatcaaacagtatcactttataagagatgttgaacgcttcgagtcaggggaatctattacactaccaattaattacggtatgattgcggaggactctgacgatgtattcaccacaccacagaaaatgtacatatttattcaagcgttaatgtacatatttaagttagcatttatacttaagaacaaaaataaaatgaactttcgttcaaagcaactaaaaaactcgtaatgtacttttggtattgaaaagtacacacaccaaataaactctaacgagtttcattttaaaaattatgcagctttcttttgttttccaaacccattatactcatagacaacacccataatatcaaagatagttttcctctcatatcgatgagatttccgtccattcttctgtaggaggtcgaacaaacggattaaaatctttgttagatcttgggtgtttctctgtatcgcttgatataacagcgatacatgatcttgaatcatcccaatagctttatattcacttaattctcttttgttcttttgcaacagaagtttacgcatcttaaacatcgtagaagaacagataaaaatggcaataagccttccatacacatgacattctaatcgctcttgtttgatattttgccaatgatgaatttgaaataaggatttccaagttttaaaaatgatttctatttgccagcgaagggagtaaaagtcatgtatttgttccatcggaacaatcccttcaggcgtatttgagacatatatgttgatacccgttaatcgtttactcttttctgaaaacgtaataccctttttactttccgtataggcttgtttttttctacgttcctgtatctgtttttctgttaaacgatagataattacgcgcgtgaatagtttttgattctttccaatgtaagcttcttttatttcatatgtttgaccgggttttaaatggttcatgatatgttctaaatcaacttgaatatactgtgattgcttttttacggttccgtttcgaaagtattctggagacggattttttatataaacagtatggtttaattttaatctggatatatagtaggcacctcgttgatccatttgatctaagtcttctaatgaaaaataacctaaatcacgaatgcacaagtcacctggacgtaaggtatctaaacattccgttccaaaggtcttatcattatttttccctggacccacctgaaagtttaaaaattgaccgctatgtaaatcatactctaattgaatcttgatacccgctgtttgtgcgcaaccaccggatccaggatatatactagctaaatgttttgggatttgaaaaatcgtcgcatctaaaatacgaatacgttgaaagtgggtaagcgccgtgcttgaaatagccgatgttttacaaagtttacttttccataatgtagaaaaaatatatttcagaaattcaacagcttttttatcaaagcgtttattaagtccttctggactcataagagtacctgtagctgcatgtaattggctacataatcgaacgagggaatcactcgctgtcctttgacttatccaaataaaaatggtagctaattcacttcctgaaaattttcgttttctttttacaaaacctaatttttttgcgagttcttctaaaaaagaaggggttaaatgacggcacagctcttcagaaaatagttgtaattcatcttgaatcgaaagattcataaaaaacgtcatcctttctagttagctttttagaaagaataacgtttttttacacttgggggtagtctagattcttaagttgatgggcatgtggaacaatctatattttgattaatttttcgttggggttactatatggatttttgatgagattccctttattagaaactttgattatagcgggggttattacaatttcttctagtgctatcgttgcaaaagtgctagttgatttaaaaagaacagggaataacgaaacggagctaattttaggaattatcatgtttgaggatatattccttgctgtatatttatcagtggtttctggcttagtacttggtgatcatgcttcatttttaggtgctcttacctcaattggtatagctttgggatatatgctcttattctttattgtagctagatgggctactccgttattaaataaattgttgaatattagttcagatgaaatttttattatagtagtattttcttctttattctttatcgctggtttttctgaaacaattcatgttgcggaagcaatcggagcgcttctgttaggtttagttttttctgaaacagagcatagtgatcgaattgaacatcttgttgtttcatttagagacttttttggagctatcttcttctttagcttcggtttaggtatagatccgttttcgttgggtggagctatatggctaacgttaggtgctgtactactgacaatcatcgggaactttgtagcagggatgattgcaggaaggcaagctggattatctcataaagcatcaacaaatattgggttaacaatagtgtcaagaggggagttttcaattattatggctaatattggtatagcgggtggtttaatgtcagtgttgaaaccgttctcagcactatatgtacttatcctatctattttaggaccactctttactaaagaatcgaaaaaaatatataaatttttaaataaaatatttaggtgggatacaaaatctacttaaacttaggacattgaactactcaccacttaacgtccttacagactttttgaagtgggagattcctgctaagataaccaatgtatccaccggttatcttagcaggcgctacccgtagtccctacagtgagaacataagtatcttgtacattgacgcaccacactccctactttagtttggttttcgcaacttcggcaagcatggggcgaaagaacgttgaagattttacagttgcaacgtttttctgaaaccaacctcataacttcagttttcgaagagcaatctgtataagtaaatgatagcaaatatgttggcttatgcctatcgatattcatatcccacctaaaattggtgtttcacaccttgacatttttgaggaaggagtcttctgttggaaaacgataaaatctttttaattacttgaattctaagtgtagaaactttgtaatttgtatgaattgagggattgaattccttgtgttaattaacatatatatcgatttgatataaagataggatctaaaaggagctaacaaactgttagctccttttagatcctttttaagtatatcgcacaaaaatcaaatcatacatcacgaaaagtagcttttaagaacccctattttaaatgttttgtctagaaaagtatggataacttcatgaatgggtgaaaatatctatgcttttttattacaagacaaagatatactgtactcataaatgtagaaatatctatttaagaaagattgaaatcatatccaataatctgataggagatgtagctatatgacagtattcaatactaaagaaattaataacacaccttttgaaagtaatatcattccaaaaggaaaccgtaaccgtcctgcatattccatgaatccaagatatatcacaattcacaccaccgcgaatcaaaatgcaggtactgatgcaagagcgcatgctagatatgttaacaatggtggtggatcatccagcgtatcttggcactttacggtagacgataatcggattgtacagcacttaccactaaatgagaatggttggcatgccggagacggcttcttgatgttgcctaacttttttcaaaatgtcctttacaaagggtacagattaatttgaaagagtccttttttatacgtgatgacaagcaacaaaatgctctacaccaacattacggaattctggtactgtttttttacaaacatccgttgcaaatgggcaacgtgtatgaaaacgacagcccgaaggtggatttgctggacttggaatatccccttctagtataattcgttctcgcttcactgttggatctggtattggaacagctgataacaatgctttcgtataaggatgtagcggattggtaaataactcatcacgcggtgctgtctccacaatcgtacctaaatacataattccgattttcgtacataaatgttctactacacttaaatcatgcgaaatgaataaataagataatccccttttctcctgtaactcactaaataaattaataatttgtgcttggatagatacatctagtgccgctacaggttcatcagctacaatgaattctggatttaataccatagctcttgcgattacgatacgctgacgttgtccaccagaaaactcatggggataccggtcaatatgataaggagctaatccacataactccaatacttcaattaccttttcacgcacattttctttcgttgctaatccgtgggccaacattggctctccaagcgcttctccaattctcattctcggatttaatgagctaaatggatcttggaaaacgagttgcatattagggcgatgttttcttaattcatccttggataaagaatgaacatcttttcctttaaacttcacttctccctccgttttttgaacgaggcgtaaaattgtttttcctattgttgttttcccgctccctgattcaccaacgagaccaaacacttcacctttattaatagtaaaacttactccatcaactgcttttacatgcccaattgttctactaaatacgccacccttaattggaaaatatgcctttaggtttttcacctctaataatggttcactcattgttccgcacgctcctcatataaccaacaagctactttatgattttcatcatttacatttagatttggggcttctttttcacatatttccatacaatgctcacaacgcccactaaagtaacaaaactcacctaaaccaactaaattcggaacttgccctggaatagaatatagtttatctattcgttttcccattactggttttgatttcaataatcctttcgtataaggatgttttggattttggaatatctctagtactggggcttcttcaataactttcccgccatacataacgacaacataatcagccatttccgctacgacacctaagtcatgtgtaattaataaaatcgacgttttaaattcttctttcacttgtcttagtagatccaatatttgagcctgaatggtaacatcaagagctgttgttggttcatctgcaattaataacttaggattacaactaagcgcaacagcaatcataatacgttgtaacatcccaccgctcagttcatgcggataagaatggacgatttcatcagcgcgggctatgccaactttacgaattaactcaattgccttcttatatgcttcatttttactaagtaattcatgctctcttaacgtttctacaatttgctcccctacagtgaagacggggtttagcgatgtcattggttcttggaaaatcattgcaatatcattgcctcgtaaactacgaagttctttctctttcattcctaaaagactttttccttcatataaaatgtctccacccactacactaccagattcagcaataagccccataatagataaagctgttacactctttccacaacctgattctcctactacacaaactgtttccccttctcgaaccgcaaagctaacatggttcacagcctttactgtcccctcgtcagtttgaaaatgtgtttgtaagtctttcagctctactaccgctttactcatatcttctcacctaccgtctcatctttggatctaacgcatcacgaagtgcatcaccaagtaaattaattgatacaactgttataaagattgcaaaaccgggcggaatccataaccatggacgcttttggaaatcgattaatgagttagctgcgctaatcatgttcccccatgatggtgtaggtggaacgactccaagacctaagtaacttagtgcggattctcccaaaatagaacctgcaacacctaatgtggatacaacaattaaaatgggtaaaacattaggtattaagtgatatataattttccggtaatcttttattcctaacacatccgcagcttgcataaatgcttgctccctaagtgataaaatttgccctcttacaaggcgtgcaagccctggccaacctactaggcttaaaataatcataatgacatacaaacgataatcagacggtactttccactctgataaaatcgcacccattataataagtagcggtaatcctggcattgacattaaaatatctgcaagccgcataataatattgtccacaataccacgataaaaacctgcaatcgctcctaataaagctccaagtataaccgataaaaccattgaagctaaaccaatggttaatgaaatacgtcccgcttgcataagccttgttaaaatatctcttcctaattgatctgtaccaagccaatgagaaacactaggtggtttgttaatgagcgcaacttgtattttccctgatgcatatggagaaaagaacggaccgataaaacaaaataaaaacataaaaattaatgcataaaaccctacaagtgccatcttatttttctttatctttttaaaagcttgtcgccatggtgatgattcgcttctgctctttttttcttttttttctgtaattactgtaacagtctccatttctttccccccttacttcaaccgaattcttggatcaacaactgcatatacgatatctgctaaaaagtttgaaacgattgttaaacaagaaagaaacatcgtaaatgccatcaatactgtatagtcacggaaatttaatgcttctaattgaatattaccaatccctggccagttaaaaatttgttcaataataattgccccagaaaacaatcccggtaattcaaatgctaataacgtaattgctggtaatattgcattttttaatgcatgcttataaataaccgtcttctccttcaaacctttcgctcttgctgttcgtatgtaatcttgtcttacaacctctaacatacttgttctaaaataccgagttagcgagccgaccccatgcccatcaacttaaggatagaaactctacggttttccattaattgaaatgcgtttcttaaagtggatgtctctttttaaacatacaaaaggaaaattagcaggtcagagaattgaaccacattccatacaaattttcgtgtttagcaatatttatggatgggtgcaccgaaatacagggttacgtcgatttaaaaaggcatattggcaagtagggcgtaaaaatgcaaagtcacaatctttagcgtgcgtgggctcatatgaagcaatggcctttggtgagaacatgtcggaagtatatgttggtgccacaaaaacagagcaaagtaaaattgtttggaacgaaattaaagcgcaaatgaatgggtgcgaagacctaaaagaaaaattcaatattgcgtatgggaaaattgagcatctcaaaacagattcttttatttccgcgctctcaaaagatgcgggaaaatccggggatggactaaatgttcagtgcgggattattgatgagtatcatgcccatcctacctctgaaatttatgatgttctggtgtcaggttcaggtgctcgtccgaatccactcatgatgattattacaacagctggtttcaacttgagccatccttgctatcgtgtggagtatcaatatgtttctaagattttagacccgaacattgatattgaaaatgaagaatattttgtgatggtcaatgaattagataaggatgatgaaattacgaatcctgaagtctgggagaaagcgaatcctattttatgtagttatgaagaaggacaatcttttttaaaaggagaattgcaatcagcattagatgtcccagaaaaaatgcggaatttcctgactaaaaacatgaatcgttgggtggacatgaaagaaaatgggtacatggacatgcaaaaatggaaaaattgtaaagaaactgtggaattatccgaattaaaaggattggaatgtacagtaggtgtcgatttatcagcaaaaattgatttaacaagtatttcattcgagtttaaaaaggatgataagtatatcgtattaagtcatagctttatgccggaagatacgttagctgaaaagagacaaacggataaagtgccttatgatttgtgggtacaacaaaaatggattaccacaacacctggtgcggtagttgattatgaatttatcaaaacacatattagaaatatggaaaaagaccataaatttaagattaaagaaatatgtgcggatccttggaatgcaacgcaattcatgcaagacatggaagcagaagggtatacgatgatagaaatacgccaagggatggcaactttatcaggtcctacaaaagattttagagaacaagtgtatttaaagaaagtcatccacaataacaatcctgtattaaattgggcaacaagtaacgctataacaaaacaggatgcgaacgaaaatattatgttggacaagtcaaaagcaacagaaagaatcgatccgattgcggctgtcattaactcacatgttcgttgtatgctcaattctggtgaggtagacttaaattcctatattttaagtcaagatttctcattctaggaggaatgacatgcggtttttattatttttcatcagtattttagaagatattctattgattacggggttgtccattattgttgggacgactttttttatgaatccgatttacggctggtatctgttaggggttattctcacaatgttgggggtggtaatgataagaagatagaagggaggtgaaatttttgatttttcggcaattatttagaaatcaggatacgacagatttaaaaaatccttctccctggtttaaaagtttatttggctatcaagccgtaagcggtgaaaaggtaacggttgagtcctctttaggtgttccgacggtttatcggtgtattaacatccttgcaaatagtgttgcgatgcttccgtttcaaacatttaaaaagacagcgaagggaagagaacgggataaggcacatcaagtatcgtttgttctagaaagaagaccaaatccttatcaaagcccatttaaatttaaacatttaattgaaacacatcgtaatacatggggaaacgcctatattaatattcattggggtgtggatggaagaccaaaagaattatgggtattaaatccggctgttacaacgcccactgtggacttaaagaccaataaactatggtattttacgagtttgccagacggtacacctataaaaatacctgatgatgacataatccatcttactacattgtctactgatggtttaagggggaaacctcctattcaaattgcaagagagtctatagggagctcacaagcagctcaaaagtttaaaggtaagttcttcacaaacggggcagcgcatagtgggatattaaaaacagaacaaccgttaaatagagaggctaaaaataaacttcgtgatgcctgggaagaagcaaatacaggtctaaataatgcgcaaaggatagccattttagatgctggtttagaatttgagaaggttggaatgcctttaaaagatgcccaatttattgaaggtatgaaatttgataagggcgagattgcaaatatctttaatattcctttgcacatgattaatgagttagatcgtgctactttctccaatattgagcaacaagcgttggattttattcaaaatacattgagtccaattcttattcaatatgaagaagagttttcttataaatcattttcgtttcatgagcaaaaacgatattacttgaagtttaacctaacaagcttattacgtgctgattctaaatcacgagcagaattctacaaaattatgttagatgctggtgcattttcaattaatcaggtgctggaactggaggatatggacgggattggggaatacggtgataaacaccgtgttgacttaaaccatgtatctattgaaatcgcagacgaatatcaattggcaaaagctaatggaggagtgttacagaagggagatgaggacgattaaagacgtatttacaattaaaaatcaaacagattcttcagctgatctattcatttatggtgacatcataaacaataccggatggaaatgggacgattccgatgtgatgccggatgatgtgaaaaatattttagggcagttggatgataaaagtaatttaaatatctatgtaaatagtggtggtggttctgtattcgctggtttagctatttataacatgttgaaacgtaataaagcgcaaaaaactgtttatgtggatggtgttgcagcttctatcgcttccgtaatcgccttggctggtgatcgtgttgttgtcccttctaatcacgggtttataggtaaatccctttcctaaaaaacctaactttatcatacgaggaggtgatggaagtggattggctacagattaaaaatcaagctgaagatactgcttctctttatttttatggtgatatcgtttcttcttggtggggtgcttgggatgatgaggaccaatatcctgagaatgtaagaaatatccttgatagtgtaaaagggaaagacttaaacatctatataaatagcggtggaggctctgtttttgcaggaatggctatttataatatgattaaacgtcacgaggggcataaaacggttcatattgatgggcttggaggttcaatcgcttctgtaattgcatttgccggggataagttgatcattccttctaatgcatacttaatgattcataaaccgtggaatggtatatatggaaatgccaatgattttagaaagatggccgatgacttagatgcaatagaggaagggatcatcaatgtttataaggataatctaaaagagggcgtagacatcgaagtaataagagaaatggtgcaaaatgagacgtggctaaacggtcttaaagcaagtgaatattttaacgttgaagtggcagaagaaaatactgcggttgcatgtacaagtaatctgtttaaggaatacaggaataccccaaaggcatttaaagagccaagaagagaaccgatgcaaaaaagtgaagaagaaaaaattaataatttgatgagagagatagatttaatctaactctttttttattgctcaattttaaggaggaagaaagatgccaaaagaattaagagagttattgaataagattcagaacaaaaaagcagcagcaagagagttattggctcaaaaaaagcttgaggaagcagagcaacttacaaatgaaattaaggatttgcagaaggaatttgatattgcatctgctctttatgaagatgaaaaaaacaatattccaacagaccctattccacaaccacaaaataatacagtaaaacctgctgatgcatttgttaatgcaatgaaagcggctgtagggaaacataaacttacagatgacgaaaaggaagtattaaatgcaactacaatgacagaaggtgttccatccgatggtggtttaacagtaccaaaggatattcgaacagctatcaaggaattacgtcgtagtgctccagatgcacttgagaattatgtaaatgtagaatctgtatctactcttactggttctcgtgttattgaagtagaagcggactacattcctttcgataatattgatgaagcggcagactttccagaaatggaatcaccaaaatttgaagatattcaatttgctgtaaagaaaaaaggtggaattttaaaattctctaaagaattactcgcagatacagcagaaaatattcaaggatatgttaggaaatggacaggaaaaaaatcaaaagcaactcgtaatgctctgatattaaaagcaataaatgataatttcggtacaacaaaggttccggttagtaaggtagatgatttaaaggacattttcaatgttaaattggatactgcgtttgaaacaacggcaattgccatcatgaatcaagatgcttttaattatttagataaactgaaagattcagatggtaagtacattttacaaccagatccaacaatggcgacgaagaaactgttatttggcaagtatccaattgttgtattaagtaataagacgctaaaaacagatagtaaaacaaagaaagtaccaatgtattttggtgatttaaaagaagcgataactgtttttgatagagaagcattatttattgaattctctgagcaagcattagatttatgggggaaagatttagttggtatgaaagttagagagcgcttagatgttaaaccagttgataaaaaagcgttagtagtgggagagcttacattagcagaacaaacacaagcataagaggggatatcccctcttttttaggaggggtttcatgttaatagatttaaatttggcaaaaaaatggctgagattagaagaagaggatatagaagaggatgatatcttagagcttttaattgataatgccgagatatatgtaaaaggatctgtaggtaagcattacaatgctactgaggataaccgaaaacaagcgcaaaaaatcgcattagttttaatcacaaattggtatgaaaatcgtgatttttctggtcaagtagatgaaaaagtacgatataccattaagagtatggtattgcaacttcaattaagtgaggaaacagcatgaatccaggaaaaagagataaaagaattatgattgaacataaaactgaaaggaaagacgatgagggaaacgcgctaccagcaggctgggaagtcttttctaaagcgtgggcgaaggctgaaactcccgtaggttcagggtttaattctgaagtttttaagggaaatgcagaatttgttattaagttaataaattttacaattccgtacagaaaaggtgttcattctgatatgcgtgtgaaatataaagggaagctttttcaaattaaatcagtgattgatattgatgaaaaacacaaagatatgtgtttaatctgtgaggagcgatctaattggcagaattagaggtcttcggtatagaagaatggattcgtgaattagaaaatttaggacaggatgtcccaaaaattacaaaagaatcattaaaagctggtgcaagggtatttgaagagaagttggaatttaattctccagttggccccgaacctaataaaccaacactaaaacaaccgtggtgggatggtaaacacgcgaagaacgctattgaagaaggaaaggttgtaaaaaaaggtggttcttatttcattgaagttggatgggataaagcggatcgctctcctcacttttatatgaagtttcaaaactgggggactagtaaaaatccaaatcctccacataaaggttttgcagaaaagactttaatccaaagtgaaaaagaggtcttgagagttatggaaagagaatttatgcgtagagtgacaggccgatgagaaattttaataaggaaatatttgatgttttacgtacagatgtagttattaaatctgagttagttgataactttaaacgtttatattttttagttgacatattaccgcaggtctaaatttgactatataaattattttaaatctttatcagaaattggaaaaatatataatagttatgtgtggttataagtgaagcttatgaactcaatgaatcataatattaatttatataaaaaaactttaaaaaatcgaaagaaatatgaattacctgccaatatatagtgtaagacaaaggagggctggaatatgaagggtgaaatagattacgcacatttaatccaattaactttatcaggaaataaagaagcatatagcaagttgtatgataaaacgattcaagaaatatataaaacagcacattttttaatagaggataaaacggatgtagatgatgtcgttcaagaaatatacatacaactatatgaatcgcttcgtaagtatggtagcgagaagccatttcgtccttggctaattggacttgcgattaaacaaattcactcttatagaagaaagaggtggatgcgactacgaattataaaaaaagcagaagagcaaagaaagtcagtgcaaattgatttttctaacgatgttgtaagtaaaatatcaaaccaaaaactaattgaactcattcataaattaccgtataaattgaaacaagttattatcttaagatacttacatgattattcacaagaagaagtagcacaaatattacatattccaattggtactgtgaaatctagaattcatgcggcattaaagaaactacgtcaaaaagagcaagtagaagaaatctttttaggagaggtagggaatgtgaaatgagtttagattgtagagttagggaatctatacaagaagaagcaaagggtattgttgccccgccggatttaaaagaaaaagtaattgtacaaataaaaatgaagcacgggcggagtaagaggaagaaacgccttatcgcaggagtacttgcagcagctcttttaatcccgacgacaggttttgcgtaccaatctattatggcggatggtatatatggatcttttgagaatttaaaaaacatgccggagcaatgacattagaaacgtatatgcgttttaatgcaaaattatcagaagcgaaagatgaaatgggttcgaaggaatatgaagagtttacaaaagaactgaaaaaattaactaatgcaaagtttgcgtacggagattcgaacggtaatattgattatgatcaattattaccggctaaaaaagaggaattgaaaaaggtggtaatggagcttcatccgtattttgataaattaaatggccataagtctagtaaagaggtattaactcctgaagagtatgaacaatatatggaagcattaatgtcatatcaaaccgttttagtaaaaacgaaatcgagtggggggataacaatagaagaagtacctgaagcgtacaaagaaagatttattaaagcagagcagtttatggaatatgcaaatgaaaaggtgcaataattagaaaagctcatagccttcttagctttgagcttttttattgaaacaaaaaagagtgttcaattatactttttcatatttgcattatctttttgtataaaacaatctaaaagggaataaccagctattaaactaattatcgtaacaaaagttgtatttattagaataatattaactaaataaggtaggtattctgcaagtggtgaaaagagtagtgctggggaaaaggaaatgaatagtgtaggcactgtaatagcaataaatttatccggttgaaagctccagttttgtttacttgtttcgcgattaatagattgaaggaatcgtaataaaatgccaactataagagggaagagtgtaaagtagaataatcttggataaacgttaaagttcacttgcgtgtctgtatctaaataaaattgaatttttactcctacaaataataataagacgataaataatgtaaagcagaggtatagcatcactttttgcattatattccaccatcctttactcaaaatatattcaaaaaaaagaagagatatacaataactactgttgtatatctcttcttttactgttagttaatagtggagtttgctttttcttgcttcgtgaaataatcaataatgcccattgcactaatttctatatctagatgtaaaatattataaacggaatgatctgatggaacgtttaactttgtaagatgagaagatattttatccattaacaaagtttgtaaagctttagtcgcttcatcgaaatcattatacttttcaaagacttccttaccagtctgaacgaaaataggtagccaatgttccagttgattgtatacttctgtaacatgagaggatgcgccgtaatgaccgaaataaatagtatctacatccatactttgaatatgatttttagaagcaatcatcgcatctggttgaaattgtgaaggggacgttgatggtagatacagttctacaccaacgtttgcgagttctctataataaattccaattgtatcaccagtgaaaatcccgtttgttaatgaatcgtgaatgctaatatggtgcttagcatgccccggtgtatcataaaatgtaaggatacgttcttcggcaatttttaacgtatcaccatgttgtacaatacgaacacgttcttcttctataggaagaattggatcaaatagtttatcaaaatcttctttgtatacagcttttgcacctaaaatgagttttgttggatcaatcatatgacgagcaccacgagaatgcacatataacgtagtatttgggcacttctccatcattaaaccagctgcgccagcgtgatctaaatgcacatgtgtaacgataatgtttttaacatcgtttaaatcaatatgtaattgttgtaagccgtctaaaatatacggaagagaaggggctgcacaagtttcaattaaagtaatatcgtcacctaataaaacgtacgtacctgttcgttcattatgctgtaaatcgaaatcatcaataagatataggtgagaagataattgctctacttttttcatatttaccactcctcgtatagtatgtttaaacttaatttttttactttcatgagagacctgtaaaacatattatatggttaagtcctcgatctattagtattcgtcagctccacatgtcaccatgcttccacctcgaacctatcaacctgatcatctttcagggatcttactagcttacgctatgggaaatctcatcttgaggggggcttcatgcttagatgctttcagcacttatcccttccgcacatagctacccagctatgcccttggcagaacaactggtacaccagcggtgcgtccatcccggtcctctcgtactaaggacagctcctctcaaatttcctacgcccacgacggatagggaccgaactgtctcacgacgttctgaacccagctcgcgtaccgctttaatgggcgaacagcccaacccttgggaccgactacagccccaggatgcgatgagccgacatcgaggtgccaaacctccccgtcgatgtggactcttgggggagataagcctgttatccccggggtagcttttatccgttgagcgatggcccttccatgcggaaccaccggatcactaagcccgactttcgtccctgctcgacttgtaggtctcgcagtcaagctcccttatgcctttgcactctacgaatgatttccaaccattctgagggaacctttgggcgcctccgttacactttaggaggcgaccgccccagtcaaactgcccacctgacactgtctcccgggtcgataagacccgtaggttagaatttcaatacagtcagggcggtatcccaccagcgcctccaccgaagctagcgctccggtttcaatggctcccgcctatcctgtacaaactgtaccaaaattcaatatcaggctacagtaaagctccacggggtctttccgtcctgtcgcgggtaacctgcatcttcacaggtactataatttcaccgagtctctggttgagacagtgcccaaatcgttacacctttcgtgcgggtcggaacttacccgacaaggaatttcgctaccttaggaccgttatagttacggccgccgtttactggggcttcagttcagagcttcgcttacgctaacccctctccttaaccttccagcaccgggcaggtgtcaccccctatacttcgccttacggcttcgcagagagctgtgtttttgctaaacagtcgcttgggcctattcactgcggctttccgttaagaaagcaccccttctcccgaagttacggggtcattttgccgagttccttaaccagagttctctcgcacaccttaggattctctcctcgcctacctgtgtcggtttgcggtacaggcaccttttatctcgctagaagcttttcttggcagcggggaatcaaagacttcgctccataaggagcttccccatcacagctcagccttcacgataagcggatttgcctacttatcagcctaactgcttggacgtgcacaaccaatcgcacgcttcttctatccttctgcgtccctccattgctcaaacgataaagaggtggtacaggaatatcaacctgttgtccatcgcctacgcctgtcggcctcggcttaggtcctgactaaccctgagcggacgagccttcctcaggaaaccttaggcattcggtggacgggattctcacccgtctttcgctactcataccggcattctcacttctaagcactccaccagtccttacggtctgacttcactgtccttagaacgctcccctaccactgataccattggtatcaatccgcagcttcggtggtgtatttagccccggtacattttcggcgcagagtcactcgactagtgagctattacgcactctttaaatggtggctgcttctaagccaacatcctagttgtctaagcaactccacatccttttccacttaatacacactttgggaccttagctggcggtctgggctgtttcccttttgactacggatcttatcactcgcagtctgactcctaaggataagtcattggcattcggagtttgactgaattcggtaatccgatgaggacccctagtccaatcagtgctctacctccaagactcttacacttaaggctagccctaaagctatttcggggagaaccagctatctccaggttcgattggaatttctccgctacccacacctcatccccgcacttttcaacgtgcgtgggttcgggcctccattcagtgttacctgaacttcaccctggacatgggtagatcacctggtttcgggtctacgaccacgtactaaacgccctattcagactcgctttcgctgcggctccgcctcttcagcttaacctcgcacgggatcgtaactcgccggttcattctacaaaaggcacgccatcacccgttaacgggctctgactatttgtaggcacacggtttcaggatctctttcactccccttccggggtgcttttcacctttccctcacggtactggttcactatcgatcactagggagtatttagccttgggagatggtcctcccagattccgacggaatttcacgtgttccgccgtactcaggatacattcaagagagaacgaagtttcgactacggggttgttaccctctacgacggacctttccaggtcgcttcgtctacctcgttcctttgtaactccgtatagaatgtcctacaaccccaagaggcaagcctcttggtttgggctatgttccgtttcgctcgccgctactcaggaaatcgcatttgctttctcttcctccaggtacttagatgtttcagttccctgggtctgtcttccttaccctatgtattcagataaggataccataccattacgtatggtgggtttccccattcggaaatcttcggatcaaagcttacttacagctccccgaagcatatcggcgttagtcccgtccttcatcgactcctagtgtcaaggcatccaccgtgcgccctttctaacttaaccaaactaaaaagtaattctacacatgtatgactaccaatatatcctgctccacctgttacaagtattgccataattatagtcctccatatttcattcattataaacttctcaaagtatatcacatatttcttatcctatgtttaacatgcgaacacagaaacttacattttatcccataataattttataacatatacgattctaatcaggtaataaaaaaatgccacataataaaaattatgtgacgtttttttattaaattacgtaacaatatacacttagaaaatgcgcaagactacctaataatacaaaaacatgaaaaatttcatgatgccccatatatttaaactctaaccattttggctttgttccataaataaatccaccaattgtataaaaaatgcccccaagtactaagaaaataatgcctcctgtacttaaattctcagctaacggtgcaaagaataaaacaattaaccaacccatcgtaatataaattgctgtcgataaccaccttggacaactaaaccaaaacatcttaaatacaatgccacaaatcgcagttgcatagactaaacaaaataatagcaaaccacttgctgaatttaatgtaattaagcaaaagggtgcatatgtacctgcaattaatataaaaatcatagaatgatctagcttcctaaagaagtatataacacgttcatttgccacaacactatgatatacagctgacgccgtataaaggaccatcattccaataccaaacaaaataacagctgtaattgcagcaaatgatggcatcttgatagaaactttcacaagcatagctaataacgcaataaatgataatatcgctccacctaagtgagtaaatgcattaactggttcccttacataagtattcataataacacccctcatataattacatgtagttttgataactacatgtaattatatacacatttctttttaaggtcaacatttacaattcatttgtttcgtaataccatatttaaagatatattaaacattaagttccactaagttataaaagtgagggattctacgtggaaaatataaatgaattacttaagacattacatttagaaaaaaacattaaacttgaggatattccaaatgttgacttatatgtagaccaagttgtccaactatttgagaatacttatgcagatacaacgagaactgatgatgaaaaagtattaacaaaaacgatgattaataattacgcaaaagggaaactattcatccctatcaaaaataaaaagtattcaaaagagcatatgattttaattagcctaatttatcaattaaagggagctctctccattaacgacataaaaagttcattagaaactataaatgactccttattaaatgatgattcattcgaattaaatacgttatacaaaaattatcttgctcttactgaaagcaatgtcgaaagctttaaacaagacgtaaataaccgtgttacagaagtaaatgagatttcttccttagaagatacaaagctagaaaaatttctactactaacatccttcgtgactatgagtaatatgtatagacgtttagcggagcaactagtggatgatttaaaagaatcataaataaaaaactatccacctattaaagtggatagttttttatttacttaattgcttcatgaacttttagttgtttccctttaatcgttgtagtcttcatgactttcaagataagtggtccttttccatttaatatttcaacgtaagaaacattatcttgtatcgtaataatacctatatcttctgctgtaacacctttaattttagcaattgtaccgacgaaatctaccgccctaattttctttttcttcccgccattaaagtacagcttcataatgcctttgttgatatctgcatttttatctttctttataattggtttagcatgtatcttttcttcaaatgcagctttctctttcataacttcttcttttgaaggtccaattgcctttggaatttcaaatccaatatactcctcaatctcttctaaaaatctattttcatatggtgttataaatgtaatagcttttccactatttccagctcgtcccgttcttccagtacgatgtacatagctttctttttcaagtggaatatcataattaataacatgtgtaatattatcaatatcaattcctctcgcagctacatctgtggctactaaataacggaattttccttttctaaaatcatccatgacttcaaaacgatcttcttgtaccataccaccatgtattttatcacaaggatagttagctcgttttaattgtctatatacatgatctacattttcttgtgtacgacagaaaataatacagctatcaggattctcaatcgttgttacatctttaagtagtgaaagcttctcgtcttctatcacctcaaaaagagtatgttcaattttatccgtcgtaatcccagctgctttaatttcaatatgaattggtgaattcatatatgtacgagacaatttctcaacatcttctggaagtgttgctgaaaataacatcgtcattctttttgtaggtaattcatcaataattgcctctacttgatcgataaagcccatatttagcatctcatctgcttcatcaataactaaatacttcaaacactctaaagaaagggtacccttctcaatatgatccaacacacgaccaggagtaccaactacaatatgtgtcttttgctttaattctaatttttgacgtgcaaatggagatttcccataaactgccgcagcctcatgcccatcaacttaaggatagaaactctacggttttccattaattgaaatgaacatggcaaagcgtttgtaaattagatggttctaatcgtttcgaccaatcaacacgaataggaatcatatgatcaactacatcacctatcttaatgatatccttgcttctacattgaacacataagccatgatctctacgataaataagcccacgcatctctctccattgtttggagttgtaaaatgaacgtgaacttttgtttcgaatatgtttatcgtaatattttacgatttctttttccttttcgatatgtttagcacaatacttatcccgtgttagttcattgcaacctaatgacttgcacggcttgaatggtttacttggcaccttccatcctcttcctcaatcgtttcatttcatcctcgatggccagattctttttattaatccgttcatgacacttagctatatccgcttgatgcttacgaatcttatcgttcacatatacagggacatgctcatgttcgcaatgaggacatgtgaagtaacacttctcaatgcgattagaaagctgtgctacttttggttgcatattgtaatcttcattgcagttagaacagtagactttcatctatcctcacctcatttaaaagaatattctaattatatatttacaaataaatacaaattgttataatagaattaacattgccatttggaaaagtaatttgccccccaagcgagtggcttttcctttttttatagctatttttctaagaattcatccaccgctttaccaagcaaactaatcattgcttctctcttttgctttggtgttgtattatcttgcatttcattaaagataggaagtactctttctaatttctgtttatcgatgcgttcatttacaaggtcttgtcctagcattgaaatgaatgtaccaattgcaaccgcttgctcttgtttatttagtttcattttttatcacctcaggttaaagcctttctctagtttcagtaaactcactaacttttttagctattgctttaccatttaaaacaactggaacttctataaataaagaatcctttttatttgtaagtctacccataaccttttctaacttctctaacgcttccgcacattcatttgcaacttctgttacttccttaatcccttctaatgcttcagttgtatcagcagttacttcaataatcaatttgttattagccattttgtgaatcctcctcatattgtttaattaattgttaaacatgagttataccaactttcgtcgctaacgtttcttctaacatattgacctttctattcaatgcttctacattcgttgaaacattaagtaaagcttgtttcataccatcattatctctttgtaaatcgttaacgcttctttctaaattagcaattatttttgttatagattccatccttcatcctcctccgaaataaaaagcagatactcagctacttgatcaatcacaacttgacgaactatcaaatgaacttcctaaatcatacgatgaatgcgatgaacatgaagttgaatgattactattatagccaccataatctgaactagagcttattacacttgctgttgtcgtttggattaacaaatcattatttgtactttcagcattcttttttatattgctttgagcaactgccttcttccgtttctttcttttgaaaaagaacatattttttcacccccttaaaaataaaaaaagcacctgctatggatgctttcccttcaatctttcattatttgtttccactctaaatacggaaggaacggtcttttgtcttcttatactaaattcttcaattgttgctatatgctgaggatttaaattaaattgcatcttactccctgtttctatatctatttgtggaacaagaataaacttattgtaaatttccccatccttatctataagttccttttcaatcaaaagactaggctggattggcacaatatattcatttccattggataaaataattttagaatagccactcatcctgattaccacccttgctccataaaatgactgacttatattacattgttgtatacctattttcactatttatattagattatttgtacttttaatacatattaattctaaaaggagtacttcatgaagtttgcacactgtttgttatttatttttgctcttctcatacttatgtttatgtggttcgcttagtaataaaaaagaacatccaaatggatgctccttttatggacggtatcatttaatcagtaccatctgctggtttcggattttatgtgccgtcattacgaaccgtttagaattcaagaaaaacatagtgagttgtgttttccgccacttctcataatacaaatataacatgcttttataaaaaacgtcggcctttttcctgccaaaaagcggtcaaaattctgccactttttttatcctcctcatttcaaaagtttccacttcacttgtcagttctacttcaaccccgagaaacgtctgatccaagttcttaattttcttttcaattagccaatcagggtaagctaattgctctaatactgttttatagtaatcttggtttaaccttaatgtgcttagcttttctccttgctgcatttgatattgaaccaatgcttgtaacaattcttcacacatcatctgttccacctctcattcattctatataacctttatacgtcatgtgcatattttataccttccaattacccatatgtttaattgtgtgtgatgtgtagcatcctcctgcgattagcaagagggtagctactgcccatttcgggtacgataggtaagaatttgatgttatctccaacttttcccccgcctcacaccgtacgtgcgactttcaccgcatacggcgttccatcaataacttttgtattattaaatagtaaatagattcatgttggatcgtagtttatttaccttctcaacctgcttatcactaagcataagctgtttcattagtttttcgataaggttcggttttgtagcatgaagcaatctgtgtgctaattcatgtacaataatgagatttctgtaattatcatcgccaccatcagcccgccttttcacatgatggcaacgtaccatttgggggtagaatgccatctcaacacctgagatttcacatcttccttgtgtttgagcgaagcgacgaatacggttatcattaaactcaatgctacggttgggaacaaaattcctttcaagataagcaaatgcctttttcatatgtgctgctttttctttgtggccgtactttacccgactttcttctgagtaaatggtgtgggcttgagaaaaattcatagcacttgaatgtgacacgttaccgatgggaattgcttgaataccaccaacattaaaagttttgtagcctgatttcttataacctttattacttccattatccgcatggaaataaaccttaccttttaacctattataaataaccctattagagtgataggtgattttgtgaaaacctttgtttacttgtgttgcaactttaaagtagtcatgcacaccacgaatataagcatttaattcagatacttttactggaatcgtattaatgcggatagacttcactttcttcttaatatttgcttgaattgatttcattgaatctttaggaatgtagctttgtgccacaaattttttcttcttagcaactgctttaaattcgattcctagaaataacgacttccttttacgaaggttagtaatttttgatttagattctgagatttcaagctttagattcttttcaatgtagtttttcaccgcatgaaaccatcttttagctgaattgtagctatttgtgaagattttaaaatcatctgcatatcgcacaataaagccttgttttagtttcgttttcttctgtaccctatatcttggtctgttatcttcatagtgtgtattcgttgggaagttatgccattgtgaagctacccaatggtctaagtcgttaagtacgacattggccaataaaggagagaggataccaccttgtggcgttcctttttccgctttaccttcacccacaatttcacatttcaacattttcttaataattgctagaacctgcttgtctcttaccccaatattccatagttgttttattagcttattatggttgatattgtcgaagaaaccctttatatcaatatctacacaatagtgaagcttattaatattaattaaaaagttggtacgagcgattgcatggtgagtcgatctcaaaggcctaaacccatagctatgctcataaaattttgcttctacaatcggctcaagaatctgtttgaaacactgttgaataatgcggtcaagcatagttggtattcctaacggtctactttttccatcagctttgggtatgaaaacccttcttacgctatcaggcttgaagttaattagtttttcacggactagatgaatgatttcatcatctgagaatcctttgtattcattaattgttatttggtcagtaccaggtgttttacttccttgattagatttaatagtaccaaaggcaagttttatatttctttcatcaataatgaaagaatataaatctttgaagttcccaccattttttgattttacatacagaccatctaattccccttgaaaattataatattgtggttgaatactacgatttgccattagtttgtttgttactctcctttataggatttcacctatctactcttactcgattccaaacatattcactataataattattttggtattgacttagggctatccctccactatgtttccatagtttcaacggtactatgcccctactctcatcacattgaactacatttcttctagtatttagcttccctgtagtgacagaacactcgcctataacgattaacatttctgtatgtgactttccacgttccgtaacctctagctgtgcatacgattttaggtccaacctctccacctgtcactttaacaataccatataattgctcccgattttcataatcacgatttttactcatcggtaagtgaccttgcgaacttagcaagaagtccatttctagacattatgggtatagatgggtacattcagttgttcgtctatccttaatggaattactaaccataatcgttttatagcctcccgccctatctaatacgacaagtacctctacttgtttttccacaactcgtaaaggagatgttagggtattattcaggcgacttcacctagcttcatacaataaagccaataggcgctttatcgcatgtaggagtatcagagtagacgcttcaagcttttgttggcagctctcatttcatctatcgagaatacagttatcataaacctttaataaatactgatttatgttctcttttcgtagttcaactacttatagagaaacgtgtcgcacctgtgcgacacgttcctaactgaaaaggttaggcgctgattcaatattcagcagaactattatttcgagaagtcaaatgatagggtaacgccttgaagggcttcctctgatactccgacatgcagcatacaaaagataagcctgtagttgtgtgaagctcggtgaagtcggctgagagctaccgttaaagtatctcgatactacgaaaactgtccagcggtggatggtgtagcctataggccgggagtctaaaaagcactcatgggtagaatggattcaacaaaaccaacgggtaggcagaatctgacgaatcttcgaatgtacgggtctagaacgatgacacatagaaatgtgtgtgccacgagcgtggtgctgatgtggatgagtaaaaatagttgttatgaaagtccatatgtcgttataggcgacatcaagtcagtaggcttaaaggagaaccctaaaagtgttatgcatagatagaaataatggaacgtggaaagccaccaacatggagaacttatcttcgaggaagtgtttgaagggaaggtgtttgtgagattagcaaacgtataaccttcatttatggtggtgagagtgatggcatagtaccggtgaagcaatggaaacattgcagagggatagccattagtctgatgaaagattgaccaaccgtttcaacaagctacgcagtcgaattataaggttcttgtgagactaaaaaaggtaaactctgaaaggagatccgacttataaagaaaactgaaaagcttagacacgctgaatattatgatatgcagtctacactagatgacttgtatcagcaaagtcaaaacggtaacaacttttataaattaatagagcttatgaagatggatgaaaacatacgtttagcatatcgaaatataaaaagaaatatgggaagtctgacagctggaacagatggaatgacaattaatgatattaaaatgctttcaacggatgaagtgatagaaaaagtaagaacgatgtttggttggtatgaaccacaatctgtaagacgcgtatttataccaaaaccaaatggagaccgtagacctttagggataccaaccatatgggacagattatttcagcaatgtgtattgcaaatattggaaccaatatgcgaagcgaaatttcataaccatagttacggttttcgccctaaccgaagtacacatcatgcactagcgagaatgaaatctttagtgaatagaaaaggaaacggatttcactactgtgtggatatagacattaaaggtttctttgacaatgtgcatcatggaaaacttctaaagcaattgtggacgataggtatacgagataagaaattactttctatcatttcaagactactgaaagcagaaattgtaaatgagggtgttcctcaaaaaggtactccgcaaggaggaatactaagtccgcttctatctaatatcgtactcaacgaattagattggtgggtaagtaaccaatgggaaacgataaagacctcacatccatataagggaaatagtgaaaaatatcgagcgctaaagaaaagcaaattaaaggaatgtttcttaattcgatatgcagacgatgcaaaaatattatgtcgtgattatgtaacggctttaaaaatgtttgaagcaacaaaagactttcttagaacacgcctacatctggatattagccttgaaaaatcaaagattataaatttgaggaaaaaagcgagtcactttttaggctttacagttaaggcaaataagaaaggaaacaaacatgtggctcatagcagaatgtgtgtaaaatccagaaaacatgcgtatagcaagctgaaaaaggctgttaaagatataagcagagaacaaacaccagaatcagtatggcgatttaacacgactgtaatgggaatacaaaattattattcagccgccacacatattaatcacgatctagatcacatgagttgccatctcataagaacactctataatcgactgaggcgagattggaaaaaagccactaagagtgacatgtcgactgtattaaggaaaagatataaacgatacaatcctaaattgtataaaatcaaagacatcgtattactacctatccatgcgcagaagcacaaaccggctagaaattttactcagtctatctcaaattatacaaaagaaggtagagagaaaatacatgatacgctaaaagccgtagatagggagacactccgacatgtacatcgtttttatatgaagcatcgaacagtagaatacaacgataacagaattgcaaagtttattgcacagtatggaaaatgtgcaattacgaaacaagaagttggattagtaggttggcactgtcatcataaaattccgttggaatttgggggacaggacaattatgaaaatctggtaattgtactagaagacatacacatagcaattcatagcgatgattcagataaggcaaaatcaatcttaaataagtacgacattattgaagataagaaagtgatgtttgacaagctgagaatatcagcgcgtcgacatcctatctttgcttcaatacaaaagttggtcaattgaattagatggagcgccgtatgaggtgaaagtctcacgtacggtgtgaagtgggggaaaaggtggagatgatgtcaaaaccttacctatcactatggtgcgacacgtttctctataaatagttaataactatgaaatgagaagactatctagattaacacagatagtaataactgatttaacgagtgagtggaatgaaagccttcatgttgagctgaaacactcccaataatactcctacatgcagagaaagttgatagactgcactgtatgaagctaggtaaagacgcatgaagaaagtctaagtacatgacaacatgtatatggcaattgataatgcggttggctataaactaatcatggtgagaatgaccaactggtctgacgaagatacgaatgtacgggtctaaaattcgaatacagtgaaaactgtatcccttgtatggggtaagtcaacgaaaagtaagaatcgaacctatgaaattcgtactatgtaacaatgaacatagagaacttacaggcctatagtatccacctaaaattagatgtacagctagttaaatcggaacgtgggaagcgagagacaactatttaaaccactatcttggggttggttcatataaggtataaagccgaaattgatttactctcgtgaaagcaggggtacagtaccgatgaaattatggaaacatagtggagggataaccccgagtcattaaagaaattaagcaatagtaaccaaatgaagttcataaggtcgagtatgatgatgggactttccaaaaggaaggagcaatatatccatcgatgaacgctacactgagaaacagcgagtactacggtatgcaatccacctttgacacgctatatgagcgcagtaaatataactgcacaaaaggaataggattatatgaaattataacatcaaaagaaaatatactactcgcataccgcaatatcaaagccaatacaggctcaaagacaaaaggtacagatggaataaccatagataattacaaaatgaaaaatgtagaaaacttcataaaggacattagaacagctttaaatgattataaacctcaaaaagtaagaagggtagcgatacctaaagaaaacggtaaaacaaggcctttaggtattcctacaatgagagacagactaatccaacaaatgtttaaacaagttctcgaaccaatatgtgaagcaaaattctacaatcattcctatggatttagacctaatcgagcgacaaaacatgcaatagctagatgtcaatctcttataaataaagggaataaacatcatatagtagatgtagatataaaaggattctttgacaatgtaaatcacaccaagctaataaaacagctatacaacattggaataaaagataacagggtgctaagcattatttcaaagatgcttaaatcaccgatagaaggcgtaggtataccttcaaaaggaacaccgcaaggtggtattttatcaccactactatcaaacgttgtactgaatgatctagactggtggatctcgaaccaatgggaaaacatgaatacgaaacacaagtacacaagccttcacaaatatagagcactgaagtctaccaagctaaaagaaatgtttatcgtacgatatgcagatgactttaaaatctttacagattctcacgaatctgcaaagaagatattccatgcagtcaaagaataccttgaaaatcacctacagcttaatatatcaagagaaaagtcaaagataacaaatattacaaagggtaaatcagaatttctaggattcaacttaaaagcagttaaaaagaagaataaatttgttgctaatactcatgtttcaagtaaacaaataaaaactattttagctaaaaccaaaaagttaatcaaagaaattcaacataaaccaactgtaatatctgtcaacaaatataatcaatatatattaggaattaaaaactactaccgaacagctacgcatgtaaattataattttcgcctaatagcctatcgtctatcacgaaccttatataatcgacttaaaaaccatgtatttgaaaaaccaataaacccttcggttttatataaacgacttcataaaaacaactataaaacatacaaaataatgggagtctatttatacccaatagcagatattcgaactgaaaatgcaatgaatttcagtcaaaacatctgtaattacaccacggagggaagaaaaaatcacaagagaattaaacaaagtgtagaacacgaaatcaataaaatgatgttcacacaaagaaatgacaacttggagtacgaggataatcgaatctctaggtactctatgcagttagggaaatgctcaattttaggaacattcctagaagctgaagaggtacattgtcatcatgtaacccccagaaaattaggaggaaaagatgattttaaaaaccttgtgattgttcataaattagttcatacacttatacatgctacaaagaaagagacgattgttaaatataaaaacttacttcaattggatggaaaacaattgagaaaactcaatatgtttcgtcagaaatgtaatttggatattattgattagttaatttaatgatggaacgccgtatgcggtgaaaatcgcacgtacggtgtggagcaggggaaaaggtggagattgcctcaaaaccttacctattgctatataatacggcgcgacacgtttctctataagcgtttagacgtgaagtgagagtgttgctgaaatttatcttaagcaacaataactaatatatcgagagttggaatgaaaatcgtcatgttgaattgaaacaactccattaatactcctacatgcatgatttgttagtagacagattgtgtatgaagctaggtgaagtcggctgaacgagcctaagtgatttttaatcatatggtgtaggataggtcggatggctgaaaagataactatggtgagaatgtcccttatgggtctgacgaatttgcgaaggtacgggtctaaaattgcactataccgaaaggtatagcacacaagagtgtggtagggtaccgagaagtacgaatctgacggtaggaaatcgggataagcaacgatgagcttataaactctacaggcttatagcaaacacctacggttatcatgaatagctagatatattggaacgtgggaagcaaaaaactgctaaatgaaaacagctactactgggcaggtggatataaggtaattagccgaaattcctttatttttgtgaaggtaggggcacagtaccgttgaagcgtctaatgaacgtggagggatggccccaagtctagtttgttttatgtttaattttaagaaaatgaagctcaatggtcaggtaggaatgtgggcaaaaacctaggaggtttccacagttgagcacaacaatgagatattgggaatattacaatatgcaagaaacatttgataggttatatgaagaaagtcaaggaaataaatcattccatggtctatatgaattgattacttcggagaacaatattcttttagcataccgaacaataaaatctaacaaggggtccaaaaccgctggcacggatttgttcacgatagataattataaaccaatgtataaaaaggaattcttatcattggtttgtaaacaactagagatatacaaaccaaaagcagtaaagagagtttttattcctaagtccaatggagataaaagacctttaggaattccaacaatgtttgatcggttaattcaacaaatgattaggcaaattttggagccgatttgcgaggcgaaattttacgaacatagttatggatttcgtccgatgagaggaacaaaacatgccatttctagagtaatgtttttgataagcagaaatacttttcattacgcggtagatatagatataaaaggattctttgacaatgttaatcacacattacttctaaaacaattgtggaatatgggtattaaagataagcgagtgttaaaacttatctatttaattctaaaagcaccaattaagggatttggaattccaaaaaagggaacaccacaaggtggaatactctcgccattactatccaatatagttttaaatgatttagaccaatggatagcaagccaatggcactattttgaaacatcatatccatatacaaataatgcaaatcaaaagcgagcaatgaaaggtaccaaattgaaacaaggatttattgttcgttatgcagatgattttaaaattatggcaaaggatttccgaacggcacaaaaatggtttttcgcgacaaaaatgtatctcaaggaacgattaaagttggacatttcaccagaaaaatccagaataatcaaccttagaaaaaacaaatctgagttcttaggatatttattatatgtagtacccaaaagaaacaaatgggtttgtaactctaggatatcaaataagaaaaagaagcaaatcaaacttgagatcaaaaagcgaataaaagctattcagttgtcatcaactcggaaaaatgtgcaattatataatgcctatgtacttggactgcgtaactattttaggtatgttacacatgtaaatattgaaatgaaacagcttgcatttaacctatcattagtaatattcaatcgattaaaaagtgtcgggaaatatgaagttccaatcaatgcacctccggtgtttacaaaattctttaaaaataattatcgaacatttaaagtatgtggtatttacttatttccactagcggatatacaaacagcaactatatggaattacacgcaaacccaaacaccttacaatcaaaaaggccgaaagattgccaaacatattgagttaaataaattggtattaggcgaaattaagaaactactaactgcaaatatccctaatgaaagtatagagtacttggataatcgaatggcaaggtattctatgttgaatggaaaatgtgagatacttaaagaatttttaccagcaagtgagctacattgccaccactatattccgaagggattaggcggaacagatgagtatgaaaatcttagaatcattcataaagaaattcatagattaattcacatgacaaataaacaaacgattgaatcctactttcaaaaacactcgttgactgtggaacaagttaaacgaataaaccaatatcgaagagcttgtaatttagaaaaaattaaacaataaacaaattagatggagcgccgtatgaggtgaaagtctcacgtacggtgtggagtgggggaaaaggtagagataacttcaaatccttacctatcactaacaatgatggcagagaggtcacacccgttcccataccgaacacggaagttaagctctctagcgccgatggtagttgggaccttgtccctgtgagagtaggacgtcgccaagcaactttaagacgagtcagaatgactcgtcttttttgtgttttataacttcttttcaaagctaaatattttgaagtgctgctcattttttaaaaggcctttgggtacgtagctatataagttttattcaatttctttcgtgattttttatatctaatttaagattttctattttatttcttaaagataggattcatcagtgtgttaaaatagtacagttgtttttgatgtactttaatataagaagatttaagttagaaaaggagataatatgaaaaagataagtataattactatagtagtcttagtcctgctagtaatcgtgtatatgttagttgggaattatttttataactacgcgttgaatgcgaaacaagaaaaggaatttttgcaagataatcctcatttagtagaaacggtaaatgcgtcgggagatgtattggctgcaaatgaagaaaagaatgcgaacttcgtatcgaagtataaacctaacacattaactatacgttctttcgataaattaaatttaaaaggttatgaatatatgaatgaaccatctagtcataaatgggcaattgtagttcatggatatagtggtagagcatcggaaatgacgaaatatattcgtaacttttatgaacaaggctataatgtcatagcaccagaccttcgtggacacggaaatagtgaaggggattatgttggtatgggttggcatgatcgtaaagatgttttaatttggattcaacaaatcttaaagaaagaccctaatgctgaaatagctctatttggtgtttcaatgggcggggcaactgtaatgatgacttcaggagaagatttaccttctaatgttaaagttattattgaagattgtggatattcaactgttattgatgaatttacttatcaactaaaagatttattccacttaccaaagtttcctgttatgaatgcggcaaatacggttactaaattaagagctgggtatgatttagaagaggcctcagctgtaaaacaagtagcgaaaagtaaaacacctatgctgttcattcatggggatgctgatacattcgttccttttgaaatgttagatgaagtatataatgctgcaaaagtagaaaaagagaaattaattgttccaggtgctggacatggggaagcggagaaagtagattcgaataaatattggaatactgtatggaagttcgtagggaagtatattccggcataattaaagttgttgcatttatatagacgataatcggagggataatggttaatccttttgattatcgtttttttgttaattaggtattctgctataagtgtatttttgtatgtactatatgaaggaggtagagcaaaaacttttgaattccttaatctcagtgctacaatgattgaaaactaaaagttaatgaggtgtttctatgaaaattgaagtttggtcagattttgtatgcccattttgctatattgggaaacgtagattagagatggctttagagcaatttccgcataagaaggatgttgaagttgagtttaaaacttttgaattagatcaaaatgctccaatctattctgggacaagtattaatgaagtacttgcatcaaagtatggaattagtattgaagaagctaagcgtaataacgtacagctaggaaatcatgcagctagtatgggtttaagttttaattttgatgagatgaagccgacgaacacgtttgatgcgcatcgtcttgcgaagtttgcaaaggatcaaggaaaagaaaaagagattacggaaaatctacttttcgcatacttcactgaatcgagaaatttaagtgatgtggatacacttgctactatcgctgaagtttcaggtttagataagcaagaggctttaaatgttattaatgataaaaatgcgtatgcaaatgatgttagaattgatgaagcgattgctcagcaatatcaaatttcgggagtaccttattttattattaatcaaaagtatgctatttcaggtgcacaaccacttgaaacttttgttggtgcacttcagcaagtgtgggaagaagagaatcctgcacctaagttacaagaactttcttcagagggtggaagcgatcttttttgtactgatggaagttgttcggcgccgtcgaaagagcaatagtttttataatagagtagtaccccatagatagttctgtggggtgcttgtatataactatagaagaaatacataagtgaaatctataaaatataaagttttttaaaaaacgtattgacgattatactttagaggtgtaatatagaacaagtcgccgatgacaataacgtcgcaagcgacaaacgaaataaaaaacttagttgacattgaaagatgaaaatgttaacataaggaagtcgcaaatgagcgaccaagtagttctttgaaaactgaacgaaacaaacaacgtgaaacgtcaatttttattttagatgctagacaaactaagtgcgcccataagggtagatttagaattgattaaatagcactaatctaggttaactcacgaaagacctattaccaatcacctcacctagaagggaaacctaaaggggaaaacagcatggtgataaagtcataagttggtcaactactaagatcacgactgaatggcaaggtaaaactcataaataaggatgaaggctacactgcttgaatgatagaccaagggtggtcagcgatacgagtaatgaaaggtagttgatacattactagggaacaaggttataaagaggatagtttaggtcgtacatataaactatcagtgagtctctccctcccagccacagtaagtggaaaaaggtcaaacgtcacatccgacattatgaaagctattctttatctatctaaatggggattgcctaagttgggatgccaccggcatacttgcgaatttggctatgaagaatgacaccaagttactaacaaggtgtgtgacttctgaatacccaataaggcaacggagccttcatagtagtccgagctagggaaagcctagtacatggcgaaggaaggcaacttatccggtctaaaacaaaattggaaggtgtgtgagacacaatgagaaatccaaatgcagtattagacaatctgaataaaaaaacaactaacccagcttataaatttgaacgtctgtatcgaaatctatataaccaggagttctactttgcagcatatcaaaaaatatatgcaaaagaagggaacatgactagaggaacagatgggcataccattgatggtatgagtttggaacgtatcgataaaattattgaaagaattaaaaaccaaagttatcaaccagctccatctcgcagagtatatatcaataaggggcaaaataggggaaagaggcctttagggataccctctatagatgataaattagttcaagaaatcgtaagaaacatcctagaagctgttttcgaaccgaccttttctaacaattctcatggatttagacgtaatcgcagttgtcatacagcactaacacaagcaactaaaatcttcaaaggagttaagtggtgggtagaaggtgatatcaaaggcttcttcgacaatattgaccatcacattttgattaaactgctaaaaagaaaaattaaagatgaaaaattcattaatttaatctggaaatttcttagagcgggttatttagaagattggaaattcaataatacttatagtggcactccacagggaggaataatcagcccaattctatcaaatatttatctaaatgaacttgataagtatatcgaagagtataaaacactatttgataaaggcacacgccgacaaaacaacatagtatatacccaaaaatataagcgactttggtatttaaaaaagaaattcgcagatagaaaagtactggctccacacaatgaattaactgagattacaagtgaagtgaaaaggcttcaaaaagatatacgtacaatgagttcagtagaattaatggattctagctttaagagaattcaatatgtacgatatgccgacgatttcctaatagggataattggttcaaaacaggacgcagaagaagtaaagaaagaccttacggcttttctaaagaataaactaaatcttgaactatcatcagagaaaacactcattacacacggcaaaatgaaagcgagattccttggatacgatgtaactataagtaaccttcaggctgtatacaaaggctcaaacagtagaatagccaaaaggtatgcatcaaacaagtgcgaaatttacatgcctaaggaaaaatggattggaaaacttaaggagctcaaagttcttaaaatcgaaaaagatagtagttggaagtctattcatagggccgaattaataaactccgacaatttagaaattctaagtatatacaatagtgaaattagaggtttatataattattataaactagcaaaaaatgtacacagcctacagaagtttcgctacattatgaaattcagcatggtaaaaacttttgcaaacaaatacaaactatcagtcagcaaaataatgaaaaagtttaatcatgaaggcaattttagaatttcttacacgactaaaactggtcagaagcatagatatttctataatgaacctttgaaaagagtttatgaaaatccaactactaataaagaaatagatatcgttccaaatactatgatatatgcaggacgcaatagtctaatcagacgccttcaggctagtaaatgtgagtggtgtcaaactgaaaacaccgctatcgaaatgcatcatgttaaaaaactcaaagaactaaaaggaaaacaactttgggaaagaatcatgatagctcgcaaccgcaaaacactagcattgtgtaaaaagtgtcatgttgacctgcacgctggaaggttagattgaaattcagaggataagtggagagccgtatacatggaaacatgtacgtacggttcggaggggagcgtttgaaaacctatcacagtaatgtgaaaaggcgttgggcgcttaccctacgacgatgtagaacgtgtagaaataatctctactatacttgatattgtataatcttagcttgatagtgatgtggcggtaccccatgcccatcaacctaacagaacaggttgcccccaaaacgataaaaatgaacttcattgctataaaagactctaatttttcgttttgggggcattataaaattttaacttgatggtggtgggagataccccttcaaaggaatttcctctttaatgtcgaaatatttcgttaaaacgagaatcaaggagagaggaaaatggataaggaatttttcagcaaacattttagtcttgaaaaagttagtgaagggatatacgttgcaatagcaagagaaggcagtggtgccgtagcaaatgcaggctttattgatttaggagataaaacaatagtttttgatacatttaacacacaacaagctgctgaagatttaaaatatattgcagaaaaaataaccaatcgacccgtgacatgggttgtaaatagtcattggcatggagatcatattcgaggtaaccaagcatttaaggaaagtaatattatttcaagtcaagttacatatgaaaaaatgaaggatattcatccatcgagaatcaataagcagaaaaatgatatacaaggtctaagaaattatattcattctttaaaagatcaaataaatcaaaccaatgaccctaagttaaaacatcaaataaactttctaagcgaattggaagtttcattaccaactttgaaattagttttacctcaaaaaacattttgtgatgcaataacgtttcgtggaattgagcgtagtgcacagcttttcacattaggtggtggacattcattttgtgatgcagttctctatattccagaagagaaagtaatattcatgggtgatttattatttgttgattgccatccaacattttttgaagaatcgaatcctgagaattggattcgcattttggaaaaggttagcgatatggatgttgagatagcaattccaggacatggttcaattggaacgaaaatccgcattttagaattaatagactatataactgatttaactgtaattgcacgagaaaaagaccatatcgaagatattaaagtacctaacaactacaaaaattggggttctccagaggtttatcaacagaattttaaaatgctaaaaggaatattggaatgttaaatcatatagaaatcccttttacattccacaatatggggtcccgcccatcgctattaagctaataaaaagaaataccctcaaaatgaaaatatacgttattctttctgtagaatcataggaaaggatggcgttttttgtatgtctatttctatatctgatgaattacaactatttgctcaagagattcaaagctttttatctccaaatatcttacgagatcttgctagagatgttggtttcgtgcaacgaaccagtaaataccaagcaaaagatttagtcgctttatgtgtatggatgagtcaaaatatcgctacgacttctttaactcaattatctagctgtttggaagcatcaacagaagtgctcatcagtccagagggattgaatcaacgatttaatcaagcggccgtccaatttttacaacacctattagctgaactactaaaccaaaaattgacctcatctatgccgatttcttctccacatacttctattttcaagcgtattcgtattttagattcaactgcatttcaacttccagatcccttttctttcgtttatccaggtgcaggaggatgcagccatacagcgggagtaaagattcagctcgagtatgatttattaagtggacagttccttcatattcatataggtccaggtaaacaacatgatcgaacctacggttccctgtgtgtcccaactgtaacagcgaatgatttatgtatccgagatttaggctattttcatttgaaagatcttcaacatatacaagagaaaaaggcttattatatttcacgtatcaaatcgaatacacgtatttatcaaaaaaatcctaaccctgattattttcaagatggcagaatcaagaaaggtacagagtatatccagatagatatggaggctttaatgaactctcttcaaccaggacaaacatgtgaaatattcaacacttatgtaggaatgactgataaagtcccaactcgtgtgattgttcatcggctaacaaaagaacaacaacaaaaacgattacaagatcaaactgtaagagaaaaaaagaaaggaatgaagtattccgctcgtagcaaacgacttagcggtatcaatgtatatatgacaaatactcctacagatattgtcccaatgggacaagtacatgattggtattctttacgctggcaaattggcgtgtccagataaggacacattatctagttggtgaaagtccaatcgggagaataaatccaacatatcaacattgtttttcagttcccaatgccttttgtcatcccaatagtcatttgactggatagctgcaacgatttgatctgttttaaaatccacaacatgcaaaatgccgcttggtgttctcatctatatctctccctataactaacggtcgctttaacatctggtggcattatttcgattaaattttcgccacgtattacagttggaaaattactaaaaatgtcttttaaattaattgcattcttaccgttaattgttacaagacttttttctgtatcaataataattttgtctcttgcatcaaaaatgtaaggcggatcgtttttggtatttaaatttactttccaaaactttaaatcactaactgacatcgcttctacgggcggaacatcttgccattgcataatactaatctgaatttgtgcagctttttccatatggtagttattttcatctgtccaccgcgcaaaacgttctgaatcatctttctctgtccctggtaagaattttgaaatataagcttcccatacatttcctgttctagctatccacaatcgaccaaaatactgattccatgtattcggataatcaccactctcataaatcagtcctgtttttcctggcttgttatcatatccaataaccatcgttccgaaattttgttcagcttgccaaaagaggtcgttcatagcaatttttgaaagaaccttgctattttcatcaagtatcgctatctccactcggcccatttcattaatctttttactcttacatgtaacataagcttgcataatgaaatcttgtactggaccgccaggtatattttttttaacagctgcaccatgccatcctttgcttgtactggtaccaaaatcagaacaatagaattggtatttatcggacttcatttcaccaaccggatcaccatcttccattgaactgactttactccaacctacagtggtagccatttcatcccatataagcctttgatttctttcgacaggtagttgctctgtttttaagggataaccgattctgaagtaatcacgattataaggggactcaccaaaccacacatctaaaaatgtacttggtttctgtgcttcgatttcaataattggaggtgcttctatattcccttgattaataaaagaagttgtaacttcagtatcacctttttgagagaacgtgtgaatattttgttttcctaatttatatggcattggacaaacaaaagtaataacgcctttacctctattaattatttcatccaagtcaacagaaccatcgattaatgctagataagtcctatctaattcatcatcaaaaacaagttcagcaggttgctctgtataaagccaatccgctaaatcttcttttaccttttgtaaatcagccatatcttttttcgctttaattacaagaggaacatcaatacgacgttcctccgtttctgtatgaagaaaaagagcccctgcgcgatgagggactcttactaattttcttttaactggagcccaggaagggcgttttcttccaactagcatttgaatataatcttttctgatcttattaaaagtaaaactgagtttccccaccatgctcaccacccttaaaattccgctcttcttttttggtcacgatcttgaagctttgtcgtatatgcgtaacttccgttcgctagttcttttccatctaaaacgtttgtcatattcaccgttacattcagttcttgttctctacctgatctatccgagaacatagtttttgctgtaggtgcgttgttataaggtgattgtagttgcgtataaccattgaaatcagcaagtgtattatgcgggatactataatgcgaagtttggaatccaaaatcaaaaacagatggcatattccccatctgtttcttaaccgttccaactacattttttgctgcatctacaacaaaacgtttccctttatccataccaaccccaacaccttctggtacggcgctaccgactggaatcatcactttagatggactgttaatttctaacgctccagaaatagtctttttaatctctccagcaatgcttttcgccttactatataacccacctgtcgcatcatccaaacctttttcaagaccttctataattgatttaccgacggaacgtagatttatagtgctgaagaatttttcaactgtattccacttatcttcaatatcgctctttatctcccgcattttgtcattaacagcttttttctgctcttcaaattttcttgaaactgtattttttatttcttccaccttgttgtcggctgaagttttggtttcttcccaccatttcgttatacctgaccaagtttctttcatcttttgaacgacatcatctttcattacttcttcttgatgttgcctaacttttttcaaaatgtcctttacaaagggtacagattaaaaagtacagctacctttttttagaacatcattcgtatacaagagcaaccttagcgtaaacttgcgcttaatggtacttgagaataaactgtgaaattgttactataagtaccatgtttagaaaatgtggaagaaatagaactgttccaactcttgtagatagatccagatgtatcttctcttagaagtacgtttgaaaagctagcttggctaaaagaattacgtccagtatcttcaacgccctgaaccatttttactggttcgtattgagaaaatgagccatatacaggctgatttgtatatctagggattccatttacatacatagtaaccgtaccattgccgttattaattattttaaggtttactcgatcactatctttaattgatgtatcatattgtgtgttccaatacttattgttttgacctgattcattatatcctgaattaagaaatactttatatccacttggtgtttttgaaataccaccttcaactttagatgctccaatacctaaataccaattcacatatccatccttaacaacaactgattttggtaggtttatatcagctgcaattccagtataattactatttgtaacactttttacagcaccttctgtagctgcaaaacttgtagttgaaaacattgatagagaaattagaagtgaaccgactagatacatcatttttttcttacttttccttaatacttgattcatttttaaatcccccttatttgtaattattaaattgtattaaaagttggccaactaactaagacttacaaaccaaagatacattaggtttaattaaatgtatatattttcctgtcataagtcattgaaatgtcaaataaattagaagtttcatatttattaatatagggggaattgacagcatgaagtgttatgtctatttaaaattatgaaggttttgttaaaaataagattaaagcttataaatttgttgggtataatgtgtattacgatttatttaggagagataaatatgaatggaataccaggggtttttcaaaagatatatttgaaattctgagaaataaaataaaaacaaatgaaataaatgaattgcttgtgttaaagaatttattggaatagttagtaggtaaagggaaatatatgatttaaaaggcgtggaattctcatataaaaagaagaaaggtgggcagttatggaaaagacaagatcaaagttaaataatgcaactattgaaggggggatagagacattaaaagatgaaaatgaatgcttacgtatggaaatcgattatttaaaaaagttaaaggccttacttcaaaatgagaagaaattacagaacaagactaagtggaagttttagtctatcattctacgtacaattatagtaacgtgaatagtccgaaataaatttgtttcggactaagggttcaatattctatccagtgtattcaacatttttataaaaagttgaattttctgattttataactgagaaaaatatattacattaattaatagatacttctacagagacactaggaattgttggtgctggtgtatttccaccattagaagattgttgaggtgcatgtaaactattcgtgctatatgctaatgcacttattactaccatttttttcattaataataagaatataatgaatatttaaagtgtccttattctgttgatatagtcaatttgttttaaaacagaccgtctgtaataggcggtctgttgtttgttatggttggcgactgctattcttttactcatctcatattatatttagtttaagaattgagaatagaagaataggattagaaaaattaatgttttgccaaataatttattaaatatacttaaaggaataaacagttctcctattgtaaggctgttgagtttattcttctttggtctttttatcaattctttaaatgtttgaaagtttattttattaacgaaagaccaatttggcatagcttttgtatctgaatctattttgaaaatgatatgaatactatgtgtataaaagttgcctatacttaaaataagcataaatcctaaaataatgaaccaagtcattttttagcacctcctttcagtatttaatattaagatattaataacggtgaggaagtgtgctattgtccatgaaaaatattgagaaattgttgaggaaacgttgagactgttgcaatgcaatcgatcgtaggatagttaactatgcttgtcctgttatatttgttaaaaaaggaaagagaacagttgcgtagactgttctcttaagacctgcggtagtatgtcaactgaaaaacaaaagaatttttagttatcaaaggttcatttgtttgttttgtggtataagattgtacgttgttcttcttagatttaaagcgcggtgcgctgttttgttttttgaaaaagcgtgtataagcatccgcaaggttgcgaacagacgactgaatcgcaatactatccacttcttttagccaaacaagctctttcttcatggcaggtagtttggcagagcatgtaccataggtcaagccttttcctgtctctttgtatgcttgatcccataaggataggaaatgattgaatacaaagcgagaacacccaatcgttttgttgattagaattgcttgtgcctgatttggatagatacgaaacttataggctttattcatcattatttgattcacctccatttcggtatatgactattatacaccaaacgtacattcgataggtagtggagtaacactttctatatgtcgaacaattaagatggcttcctgccatcccttgttcgaagtcaattcatctcccacctactcactgggctgtgccccttcacgctcctttttatctattagtaaaaaatagtcacctatatggttgatattggtgatactgttgatatgattgaaaatgttgtgtcggtatactataaggatgagcatatggatctgctagtggccaaggctttggtttaggaatataccaccatggtatttcaggtgtccaaggtttaggtatagtggttaacataggactctgtctataaaaatatccattcaagttcgttcctcctaacataaatttgatatttatttgatgtattatatctaattgggaacatttatgaatcaaatataattggactatcaaaattaacttttttttcagaattttattgaaaaataaatataatacaattaaacgaactggatactttgctataatggtaatatataacattagtagacttttataggatgggggaatatataatgatggtttcagctaaggggaataatgaaattacaaagctattaagcgattggtatgttgaaatccgctcaaggcgtataggtaatgcacatcaattaaaagaaataattgattctaagatgcataatattgaagaggatcaagatttattactctactactcactactagattttagataccaatttgtaattgataatttaagcgtttcaaaaagcagttttgacaaagttgaggcttttgatatgcctacagataatttcctagcttattattatcactttttcaaagggattcatgcctctactattggcgaatatcaaatcgcaaaggagagttatgaaaaagcagaaaaacttttagactgcattcctgatgaattggaaaaagcggaattttattataaagttggagctttccattatgacatatatcaagggctattatcttataaaaaagtatcagaggcaagagaaatctttgctcaacatgctgggtatgagatcaatgtagcattctgtgataatcttataggcttagcttgtactcatttgagagaatgggagctcgctgaagaatatttcacgaaagcaatggatatgttccaaaaaatagacgaagaacaatttattttaatggtgcgtcaaaatttagggttaatgtatgctactcaaaatctttcgccattagccattagatatctttcagaagtaaatcaaaaaatgcctaacaattataaggctctttttattgaggcaagggaacacatgaaggaaggaaatcactccgtcgccaaagatctcatagcaaagggatattccgtttgtcaagagattgaaaatatagagtatctacaccattttaaaatattagatgcaatgaatggaggttttcctgccgaagcacttgaaatgacagtgttaaaaggcgtatcatattttaaagagcaagaacttttcgaattcattaaggaatacgaagaatatcttgctactgcattttataaagagaataaccatattaaagcaagtcattatttctattcatgttctcaagcaggaaaaaaagttattgagaaggaggcattaaaatgaaaaaggcaattctcggtttagttggtgtaattactatttttactttaatgtttggtgcccaatcccctacagaaacacataaagctattgatgttattcaatatgctcacggaaatcatggtggttaagatcttaatttagcgaggataaaatcgcacaatacactcatagccatactgacggatattaaatgaataaaggtcttcacttcattgtgagggcttttttttataagaaccccacttataacatctttaaaatctactatatgtgaactacccgccacttaacgccctaacggactgtttgaagtgggggcttctcggttagtcgttacttttggtagctaacaccaggtttaccgttactaatatctcgccatatcgtcttaccaattttaagattcgttgttggtggattcacagcctcgatgatttctactgtattattcttcaagttttcttgaactttctctgctaactctttcgctgctttcgactctttctgtgcttcatttacttttttatcagtatcttgtacaagttcttctaatctatctaacaattctttatttgctttatttcctaaagtagcgcgaatcctattgtacatttttcttaactcttcgttcgcatcagtaatttcacgataatcgccaaacacgtattgatcttgtgaaggatcagtatgtgattcatcaccaacgattgcccttgcttcaaggtataacttaggtgtgaatcctgtatctttgattcggattgtatcgccctcattaattagttcatgtgctagtccgaaaatacgtccaatcgattgcgcttctacttcgtatgaaacagaagatacacgttttgctagctctgttttcataagagtcagtaaacgttctggtgtgatatttccttctgtttctggagtatagaaaccaaatttatgctttccatgttcattccaccgttggaacgcatcattatcaacaatgtaaggaagtccgttattgatactctcaattgtgataagtttatcaccttcatctcgtacaaaaccgacaagtgctgtgcaaatatctcttgagtgctcaatacgtctaacaccaactaaatcttttcctagcactacttcttttccagtttcttggccacgtttccttatcatatctacataccggccagtgatttgagaacctactacttcgacacgatattggatttctaactcaaataaagtagcgattttctttaaaaaagcgagcggatctataaattcatcaatagtcattgtatggaatgaagaataatcggtttttccacgtttccactttgaatccgcaagagcaatatctataaacgtattaactgtttcactctctatgtgttgtggtttaatgaacccatccttggctatttgaacccaagcgccagaagcatgtacagtaatcgttctatcattagattctttttctacttcattattgataacatatggaacaatacgaccatcacgcacttcctttaatactaagttctgttgttgtaatgcaactgcatgtgaagttccatcaaaagttttaaattctaacgtatcaatgttgtttttgatttcccaatggcgtttatcatcccaatagtcctttgattgaatgactgatataatctgatctgttttgaaatcaacaacatgaagtatcccacttggtgttctcatctaaatcgctccctatatttcacctttgctgttcctatatcggaaggtatgatttccagtgtattaatacctttattgataacaggaaaattactaaaaatatcttttatgttaatagcgtttttcccctcaatactgacatgactgctttctgtatcaatcacgactttgtcaccaacatcgaatatataaggcggtgtattttgattatttaaattcactttccaaaatttcaaatcagaaactgacatcgcttctactggcggaacatcttgccactgcatgatactaatctgtatttgagctgctttttccatatgtttattgtctttatcggtccatcttgcaaagcgttctgaatcatctttttctgttccaggaagaaattttgaaatataagcctcccaatcattaccggttctagcgatccacaacctaccataatactgattccatgtattcggataatcaccactctcataaatcaaacctatttttccaggcttattatcatatccaattaccatcgttccaaaattttgttcagcttgccaatagaggtcattcatggcaatttttgaaagaactttgctgttttcatcgagtatcgctatctcaactcgtcccatttcattgatctttttacttttacatgtaacgtgggcttgcataataaaatcttgtactggcccaccagggatactctttttaacagatgcgccatgccatccattacttgaaccatagtccgaacaatagaattggtaactatctgttttcatttcaccaactggattaccatcttccatagaactaaccttactccaccctacagtagtggacatatcatcccatataagacgttgatttctttctacaggcaattgttccatttttaatggcactccaatacggaaataatctggttcctttgaatatttatcttcaaaccatacatctaaaaaagtgtttggttttttaatatcaatttcaataatcggatttgaatgcacagagcctttgtttttaacattgttctatcaggcattacatcaaaaatcagttctgctggattttcagtaataagccactccgctatttcttcttttaacgtttctaaattcgtcccatttggaacaataatccccacaggtacagaaagaggacgggtttcggtatctgtacttaataaccttgcccccggatatccgggggttttcagaaaattcctccttaaaggcgcccatgttggaggattccaccctctttcaatatgaatataactttttcgttctccattaaattcaaaggaactcatcgtctctctccttttatacaaaagaaaagaaacccaaatctaaaagattgagtttcttgcttgtgctctattttgatattcagttacatacggatggctcacacgcgctatttctcttccttctagtatgacaggaatttcaatataagtaggttctgatttcatatagggttgcttatcaggattatcattgtcaggtctatattgaatgacattaggattatcagataatacttctctccatctagaaaggctgcctacatcatgaatagaaagtccctcaaatcgttccatttgacgtccaatttctcttaccatatcacgcatattttcagggatatgtgtaatccaatcattttgccaatctccatctacaaagattgcattaaaatactttgttagtgggtcatcaccttggaaactaaatatttcttctggttttatagaacgaatactatccatagctcctgttactgtatcttgcaatgcatctcgcacaacagaatattgacttttaatacctatcgcaattccttgtgccatacgaacaccagaaaatctcaacttatttgattcactatttaatttcaattcatttacaagagctgcgtttgctttggtacccatttctctactttctttttcagccatgtgagctgatttttgaatacctagcgcaaatccttcactaaacggcttaccaccttgatcacgtgttaattttgatggagagtttacattaagtgtagctttcaatgcatcaaatgcacctcgtgccaaactagctgctacattttgtacattccattgaccgttagatataccgttagcaaaaccactagcaaaagcttctccaggactaagagagctgacactccctaatccatctttaccaccttgagcaacacttgttccgcttgcaacagcggctccacgttttgctcccatatcacttgcgaatttattaccagccttatcaccaccgccaccatcggttgcacttcctaacataccctctacacctaatttaacattactagctgctccgactacattccctttattcccgttaattagtcgttgcataagaagagtagaagatgcgccgccatttccatctgtggttgatcctaaagtattttctacactttgtttaacacctacggccgctccattgacattccctttattattattaatattattaaacatcatagaagtcgcgttattaccgccattattatcagttgtacttcctaattgctgttcaacgcctagtttaatattaaaagcttcacctataatatttggcttatattgagccataattcgattcattaatgtagtagaagctgctccaccatttccgtctgtggttgatcccagtgtttgttctacaccttgcttaacttcctctgcggcttgaacaggttgtcctccattttgacgaattccatctgcggtactttgcggaatagctgccccttgctgagttgtatcaatgtttgttttttgtacaaccatttgtcttataacttcgagtgcctgatctatattaaacttcccattgtgtaagccttgaacaagagacgcaattgtcacttctccattcggccctaagttgtacttagtcttatcttcaatattaactcccaaagtattgagaacgtcttgtacattaataaaccctgtttccataccagtttttaacgtagccattatacgagtgccgtcttttgctaaatctgctgctgttaatttagataactgttgttgaaaaaaaataaacacagcgtcaatacctactgtgccctcgtgtaatccatttacaaattgtgtagttttcatttttccgagtggtcctaaatctatatcgagatttttctttaaatctaagtttaacttagatgcgacctccccgatattcatctgtttaaaaccatcggtaaatgaagtcatgactttaataccttctggtgtcaatggtttattacccatttctgaccgcatagtgtttatgattgcaatcgctacatcttggaccacatcactatcaagctaagattatacaatatcaagtatagtagagattatttcttttttctaaaagccaggcttagaaaatttaaaggtttgcatgcgaaataaaccctatcgggtttcattttttgaattaggccgcttgatcttcagaaatggtagaattgtaaacgacacctaatatatcaaagactgttttcttctcatatctgtgagattttcgcccattttgctgtaggaggttgaacaggcgaatgagaatctttgataattcttgggtgtctttctgtatggcttgataaataagaaaaaaataatctctaatcatatatatggccttatattcactcagctctcgtttctttttcataagaagtagttgacgcatttgaaacatagtagaagaacagaggagaatggcgatcagttgcccatacaaatggcattctaatctttctcgttttatttttttacaatggtgaatatgaaagaatgatttccatgttttaaataaaatctcgatttgccaacgtaaagagtaccaatcatgtacttgtcccatcgggacagtatctgtagaggtgtttgtcatatatacattgataccactgagacgtttactacgaggggaatactttattcctttctttttctctcttacagcttgatcttgcaatcgtttttgttgttgttcatctgtaagtcgatgaacaatcacacgagttggtactttatcagtcattcctacataagcatcggatatttcataggtttgtcctggttggagagagttcattaatacctccatatctatctgtatatactctgtacctttcttgattcttccatcttgaaaataatcaggtgtgagatttttttgataaatacgtgtattggatttaatacgagagatatagtaagcctttttatcttgtatatgttgaagatctttcaaatgaaaataccctaaatcacggatacataaatcatttggtgttacagttggaacacacagagaaccataggttcgatcatgttgtttccctggacctgtatggatatgtaggaattgtccgcttaataggtcatattcaagttgaattttcatcccagcagtatggctacatcctccagccccaggataaatggttgaaaatatatctggaagctgaaatgcagtggaatctaaaatgcgaatacgcttgaaaacagaggtgtatggagaagaaagtggcatagatgaagttaattttttatttagaaggttagtcaatatatgttgtaaaaactgaactgctgatgtattaaaccgttgattcagtccttctggactgatgagtacttctgtggatgattctaaacagctagataactgagctaaagaggttgtagcgatattttgactcatccatatacataaagcgactaaatcttttgcttggtatttactagttcgttgtacaaaaccaacatctctagcaagatcccgtaaggtatttggagataaaaaactttgaatctcttgagcaaatagttgtaattcatcagacacagaaacagacataaaaaacgccatcctttcctataattctacagaaaggataacgccttttttactttatggatagtccaaaaccttaattttatagcgatgtagcggtaccaaatatccgtttaataattatttatgctaactttatatatctgtataatcaaacgttattattcatttttaattgctctaaaagataatcacagacattcacaaaaatacattgtttttttaaacttaataataagtatttcaattcaaattcttgataaaaaatcttagtgatatatagtttaaactcatctaaattaggcttttctgggctatatagcatatctaaaggaagtttaaatttagaaaacaaatgatcgttttgtgcaaaaatcgaaacttcttctctagttaatcgatcatgaaatgcaattgaaatgtttcttaaggcatttacttgttcttcttcaaattcatgatctataacaaatctataaaatgggaattcatctgactgaatcatactttgcataagtctaaattgatatcttaataaagtcacttctttgattaaatccatatttcccctcctttatttccctaaattaaccagtttatcataacaatttataacttgaaatacaaatacttatgatatatcacccatacaatttttattaacataacctatcattatcaatagttaacgatgctaaaaatttcgttatggggtaattaaaactattagcttgatagggatggggtacttttacaggtctctcatgaaagtaaaaaaattaagtttaaacatactatacgaggagcggtttgaatgaagaacaagtttacgcgtatgatcatgttaatggtggtaatggctttatcagttacagcacttgcagcatgtggagataatcgtgatcctgaagaagttgctacagcatattttgaagatgctaaagacggaaatgcaaaagattttggaaagttatttacaccagaagcaaaaaaaatagttggttttattggcggaaatgcagaattaatgaaatcaattaatgaagatcttaaaagctataagattagaaaagttgaagagaaaaacgaaatcgctacagtaactgttgatgctgtgtataaaaaagattctaaaaacgattataaaaaagtaatcgtaattgaattagagaaaactgaagaaggttggaaaattagtaaatcataaaaaaaacggtctagaattctaggccgttttttatttttgaacattttaactcatagttattttacatcttatcctattttttttcttctttgtaattccatgctatttctactacttcttcaggagtcaattcttcatcattccaaaaaattaaatcacttggagcagggtgaggtacagcagagttattaaattgatgaacatagttactgtgttcatcttcaggtaaatcaagatcataaattttttttacaagctcaagcagttctgttttcgtcattttacatgtcatatttttcatccttccgtttaatttatagccctttggtcccgaaatggtatgcgggatctaaaacgttttgatgcattttaggagatacaattattagattatcaagattatagacatctccacctttatcaataggctgtttatgatgtagtatatatttattatggttcccataatgttctgctcgtggtgagtaaggtgccttaccctgcttcataagttttatattcataggactaaattctttagcatagctcgaatcagaaagtgttttccaaaattcttctctaaaatcgtcaaaagatttgaattctcttcctactaatttttctcgaacttcttgcggaataataccaatagcaccatcattatacattaacttcttttgggtacctaaacttcgttcgaggttaaaacttgaggtcactgtacctggggtctttctttttaccgcacttgaagtttttgcaaacatatatgtatctgatggtttaatagtatcaactttataatctatcttaccataagcgaaagctggttctaaacgattttctaactgaagcttggatatagatgataaattttttccccatcttgcaccattacctacggcactggcacctcttgtgacaagtccaaagaaagctaaattagtcgctccgtatgctactgattccgtgatactttctgcatctccatattttatgttctccacataccaatctgataaaacatttcgtatagcatacatctcttggacttcctcgtccaactcatgttttaatgttccaataggattattccacatatctttcataaattcgtatttatctctaaattcctctttcgtatcatcaatagaactctccacaaagtccgtaagtccatattttgcatcttccaatgcgtccattggattatccaccaagtttccgaaaaagtcggatgtttggttccaccctttttttaatggatcaaaaatagtgtcccctgcagccttcccgcttcctcgctgaaaggcgtcccatagcttgcccatctgattaaaatccccaaacgctttctcatccgcttcacggaatgttttcgcagctttctttagttcgagttcagtatgatgtaaatgcttaactaaatcatccatactcctcttttttgagaaaaattcatcgaaaaaccgttgatatgccatcccttcccaagacatctgtaattcgaacgtgacttgtaaaagctctcgaattatactttccatagactctctatttcgtgacatggaatttgcagctgattctaatttatctgggtcaacacgtacttgtcccaattaatttcctcccttcacctatatgtataaaacttctagtacaagtatagaaaattcataggggggtacagacacatgcccatcaacttaagaatttgcactacccccaagtgtcaaaaaacgttattcatccgctattaatataaacaagttaagaaaaacaaaaagagagcatcatattgacaccctcttgacacacagagaagcacacgctaatatcataaacgagtatagttcttaatattttctaatatagataaccaacagtcctgtagaatggggtccaccgccaagtgatccatttcttcaagggctttttttatactctctttagttctacgagggaactctttcatatccatagttccattagaataacaaatcaaacaagcttttaatgcccctttaacattattcaaattaaaaatcgagaatgtataagattcatcaatactaaacggaggactcttccttatttcgtctaccactacaccgtcagagtctctccaactatactcaatacgagtcaaattctcttcttctatcattcttttaaaatgattatataactcctttttcttatcatatatcttcaaatatccatctttatttctatttccataataaacagttcctttatgtctatcctgttgctttcctgttttactataagacacaatatcactcatatgacgctctatatcaaaagcaatatccataccataaaccactcgcttattagacttcaaaactgcatttaacgtatgaaaaacggtttcaaacactttttcataactatctttttgcaactcgttattttcaaatttagaagggttaaaatcaactttcatatcatagctatctttttccttttccgaattatgtttccaccctatataaactgcaccttcaccatatccaatatgtataactctatgataatctctaacagacgtcccatgttctgacctaataggtgtattcggtaaaaaaatctgctttgacgatattttagttaaaacatcactaaattgtttctctgttacatctttatacttaatcattagcctatccaaataaacttgcataaaatctatcccgctccttattttttattaaacatgtcattttgtacacgattttcggctattagaatgtccgaaaatgtcttcgccacatttctacaatttacccacacattgaattatactgttcaatctctatcgtgacttcaaaaatttctaattgccctaaataagaactaatagcattatccaataaaaactcaacattctctggatcaactacactttcaccaggaactccaaacaactttacacgtaattcgctaattcttttcaaatcattcaattgtctttctgtcagtttcaaattgttaccctcactttctatcaatctgctcctacacctccgttacctcgccgaccgtacgctcttctcactcattccatttcgtttgccatcagttcacgcgccgtcgtgtcctttgagagtccactccgtcaccttaccttctgtctgcacttcacttcattcatgtcgctcccttaagtcgtctacttccggctccgtcgaatacacttaataaataagtgcccatttacacagttaactgccatgggtttcctttcagtcatacaacgttcacccaagtgaataataattacaactcatacgattacaaaagccgtttcctaattgttcagggacccatgcacggatattctaaatgagtaggtggcgggcaaacttcagccacaccaactacgcatttagtttatcgatgtgcatctcctaatcaataagactacattttcgaaacataaccgttacttcaactcaaacatattccctttttgattcaattgttgctgcgttacattttcaaacatcatactcaacatttgttgcatctttggcatttgttccaacataaccttttgattcacataattctctaaagctaaatgaactaaagtgcttttcggtacaccactttctttgctatactcgtccaaccaatcatttaactttttactgatacgtgtattaacacgaaccatttcactcatctaatcacctcttgtatatcgtactacataaatataacatcagtttaaacacaatatcaacactaagatacaccagaacaatgtaaaagtgggactctatccgctattaatataaacaagttaagaaaaacaaaaagagagcatcatattgacgaataacgttttttgacacttgggggtagtgcaaattcttaagttgatgggcatgtgaattaacccccagaatttaattttttcttctcctcccaaaactataaacttactatttgaagttccgattttcacttaaagcatttacatgtatcaccctctatttccaatatttataataatagtaatataaccgactataattgtatatattttacaatcaattcacctattacgatcatttgaatttcgatatataactataaaaaaagttattatgtctacataataactttttttcaccaatctactagcatagttctaaatatagaaaaatatcctaataatatttgaggaaaacatattcatataattttatttttgtatattaaaattatatataaatgctatactaagatgaatcaagaagcatccaagattctttgattaatcactacattttccttaaagcaaactcaacaagaaaagacactgtatagtgtcttttcttgttgagtttgctcctttaatcaatagtaagagaatatatatctataccttcttattgccgattggtattagaattgctgctcccacaagcagaatatctgaaagacactcatataagagtgtcttttctttatgtaaaaaattatttttaaacaaaaactctttataaaagaacacaggttcgtatataataagaacaaacgttcttttgatttaaggaggaatcacagtgtatgactattcaatcctaccgaatagaatcatcttatgtgttgatttacgtagcttttacgcttcagttagttgcattaaaatggggttagaccctatgcatacaaagttggctgtagtaggtgatgtgaacaggagcggatcaattttattagctgcaactccaccactgaaagcactgggcgtaaaaaagatggcaaggctttacgagattcctcgaagaaaagatattcttgttgtgaatccgattatgagtacttacataaaatgctctaattacataacggagttagctttacaatacgttccttatgaggatttccaccagtattccatagatgaatttctgttggacgttactgatagcattcatttatttgctaacgatccctatgaatttgctttgaaattcaaacgtgaaatatatgagcatacacgcattgaatgtaccatcggaattgctccgaaccctttaatgagtaaggttgctttagatattgaagcaaagaagaacaaagaaggtatcgcatattggaagtatgaagatgtcccaacaaaattatggagtatacgaccactcaataaattttggggcatttcgtacaaaacagaagaaaaattgaatcgaaaagggatacattctattggggatttagccaattaccctcttaaatacttaaaacaaagcttcggcaagattggggaggaattgcacttacatagcaacggcatcgacttcagccgtatttcggaaaaatacgtccctgctacaacttcaatcggaaaaagccaaattctaatgcgcgactatacaatagaagaattcccaattgttctattggaacatattgaagaagtctgttatcgccttagaagacaaaacaaacttgctcaaaccgttcaattctctgttggttatagcaagagttatacaggtggaattaggaaaacacatactttaaaccgtccaacaaatttaacaatggatatttatcatatctgtacatactttttgcatcaacaatatactggcgaacccattcgcagcataaacatatccttaacaaacttaattcaagaaggagaagaacaaatttctctttttgataatgtcacgaaacgagaacaagaagtgaagctaacaaaagtaatggatgaaatacgcacaaagtttgggaaaaacagtattttacgagggatttcctacacgcatagcgctacagctagacacagaaatacactaatagggggccacaaatcatgaataacgctaatatgccaaaaggaagaggaatggtgttaacaatagtataatatatgagtagagataacgtatacaacgataggtagttcttagagattggaacgattgaaacacataaaatcggggaacaaacttattcaacacaaagattacatcttgtgcaagaaccgacaccagcagagattactgttcgtagtttatctggtttagtaggttacgtgaaatcagaatttgacacaactgaacctgtaatgattcatattgtaaacccaacaacggtaagatgctttactgcggttaatggagataaggctagaagtacttatatcgaagcacaagcatccattccacgttttaattttggaagcttttatgacagagaagaatttaatattgcattgcaatcaggttttgtacaaaacaatcatcgagacattgttttacaggtagtaggtacggttgtcgaaaatgatgttaaggaaattggagatgatggtgtatcgcaagctgtaacggtgaaaacaggagttgcgagtagagggaatgcaaaagtacctaatccagtgcaattaagcccatatagaacatttgttgaagtggaacaaccagaaagtaagtttgtgttcagaatgcgtgaaggtgcacgttgtggtttgtttgaagccgatggtggggcttggaagttagaagcgatgaataacattaaagagtatttaaaagaagctttagcgcaagaaattgagtctaaaaaggtgtttgttttagcctaatggatattacaacggtagaaagtacaacgaatgtctgtatctttggattagggattgtgatacttgcgtatggagtttataaaggtggtactttcattgaacgaaagtttgatgaaagtgatcgcttagaaagggaggctttaaatgatgggaatagaaagccgagtccttccggaacatctagaaaaggctttggaattagaagaggagcgtagagagtgtatacaaaatctgcatctgttatataaacaaatgaaccaggcaaataaggaaaggaataaaactttgtatcttgaattacataacgcttatcagaagcaaggtataagagatttagagatatcaaaacagttatcagctatgtattttaagaaacagaaaagtgatcgtgaagcagaaagagcagaggtttttcgtgtagcagatcgtcttgaaaaagttggtggcagaaaagaagtagttgaaagaattcgcaagaaagcataagagaagaacccgctgcaacgggtcctaaagaaaaaataataatacgtattataacaattaatcaatgttttgaaaataggagaggtaggaaatatgggtatttttcgagtgaaaaaggatacgaattattcggtgatacacaatacgcctttgcgtgatgagaacttaagttggagggcgaagggattattagcctacatgctttctttaccggatgattggacatttcatgctactgaattaagtcaacatgccaaggatagcgagaaaacaacaacaagtaccctaaaagagttgaaaaaggcagggtatttgaagagatatccaatccaaaattcagaaacagggaaaatttcacattgggaaaccattgtttatgagttaccaaccatagataccaaaaaccatagggtggataaaccacctagtggtgaaaccactgagtggaaaagccaccctatggatgaaccacatgatggtgaaaccaccgagtggacgaaccaccctatggaaaaatgccgactactaaatactaattctttactaagtactaataatatacaaaatactaattattatcatgatgataataaagaatcaaaatcacatgtattagtcgatgaagaatttaaagtcagttataactttttaaaaggtgaaggaattccgttaagtgaaattgccattacggaattaggagagttttgtgattcgtttggtagcgaattaattaaacatgctgctcacaaagccattgatgaaaataaaccaaaatggaattatattaaggctattttgaaaagctgggaaaagcaaaaagtaaaaacattagatgatgttgctgcattagatagacgctttgaaatgagtaagaaaataaggaaatatttgatgttttacgtacagatgtagttattaaatctgagttaggtggagaatttatatatcaatttgttaaaggaaatgacaaaacagatatatggattacattttcagagttaaatagttctcctgggctatatgcagagaatgaggaaaaaaccactaacgttatgtatcaggttgatatatggtcaatggcaccaatcaaaacgcaattaaaaagtgcagttcaggcagctatgaaaaagctgtcttttcagcgtttaagcacttatccagattatgaaatggatacaaaaatttatcgatatggttttcgttttgtaacggaaattattaattaaggaggaaaatgaaatatggcaatgacaatagattttagagatttacattatgcggttttaactgaaacatcagatggtaaatttaattattctacaccaaaacgaatcggtaaaacagttagtggtaaagcgtcacctaaagcggaatcagtaactttttatgctgaaggtggaccagcagcaacagctagtgcatttggcggtacagaaattgaattagaagttgatacattacctttatccgtttatgccgaattgttaggtaaaaaggttgtaaaaggtcaagttgtagataatacaagtgatgttcctccttatgtagcattgctatatcgtttaccatacgacaacggaaaaaatctatatgtatgttattacaaaatgaagtttgagcttccaagtgatgaacataaaacagcagaagataaaccaacattccaaagcgcaaaaattaaaggtaaggcaattcaacgttcggacggtaattggagacatcgattagatgaagaggaagaaggacacgatgcagcagttgcggcaaagtggtttaaagaagtaccagctccaccaatagaaacagccccaccaagtgggaagtaattaagaaaagggatggcgaaatgccatccttatttttattaaggaggaaacagattatgaaaatcacattacaaaatacagaaggtaaaaaagatttttatttaccacaatttatcccaggttcagctacttttgaagcttcaacattagctgatgaattacaagcggacttagtaccaaaagaaacaattgaaagagctgctaattttgttgccagtgtgtacggaaatcaatttacagcacaggaatttgtggatggcactcatgtatggtttttaagtcttacaattcattctgtttgtttaacaattatggggcgcctaaatgatgcgattaaggtaatggaaacggtagaagatgcgaaaaaaaagttaatggcacaactagaaatgaaaccgacggaggaaaaatcaaatatagcgacgctgtaattgatatttataacatattgatggatgcaggtatgacacaaaatcaaatcaatgaaatggatattgcgttttactttacctgtttagcgagaaaacaaaaagcaaatcgagtgacaacagcagataaagtaccaatgtggttgtaaaggtaggtgagaatttgaatggcactaggagataatacaattggtggtcgtgtccgtttggatacagatcaattcgaaaatgggattgcaggcattaatagaagtctgaaaagaatagacgctgaatttcgtaacacgtctgagcagttacgtggagttggttcagagatggatcaactggagaataaggcaaaccatttaaatcaaaaaatagaagctcagacgcaaaaaatgaagcattatgagcaagctttgagaacttcacaacaaaaacaacaagaaatgcgtcaaaaatgtgagcaattggctacatctatgcaacaattagaacaagagatacagcaaagtactcaggcatacgggaaaaatgctcaagaaacaaaagatttgcaagctcaatataatcaattacagcaagaatacaaacaaggcacacaagctttacaaagattaacttcatttgtttgttttgtggtataagattgtacgttgttcttcttagatttaaagcgcggtgcgctgttttgttttttgaaaaagcgtgtataagcatccgcaaggttgcgaacagacgactgaatcgcaatactatccacttcttttagccaaacaagctctttcttcatggcaggtagtttggcagagcatgtaccataggtcaagccttttcctgtctctttgtatgcttgatcccataaggataggaaatgattgaatacaaagcgagaacacccaatcgttttgttgattagaattgcttgtgcctgatttggatagatacgaaacttataggctttattcatcattatttgattcacctccatttcggtatatgactattatacaccaaacgtacattcgataggtagtggagtaacactttctgtatgtcgaacaattaagatggcttcctgccatcccttgttcgaagccaattcatctcccacctactcactgggctgtgacccttcacgctccttgaggaaggagtcttcttggctaaaataataaataaaaaaagaggatcgccccatactagagcagatcctctctttcacttcacatacacataggcttcgtttgctgctatataatatgttttacctttactattgtgcactctatattgtggtgaattatttacaattacctttgtatcaataatgaatcctaaacccatatctacagtaccggcaacatctttatcctgccaagatggagaatcatagaaacgtaaattatttacttttgaaataactcttttaccaattactgtagcaggctcattaccttggtaacgaatatatgaagaatcataataaatccattgattaccaccaagatgtaaccagtttcctaatttaccccatactttataagcctcacctttttgtagcttacgaataatactattttctgttgatggtccaaagcggagatttacattgtatccttcaatatatgcaataccattcgactctactgtaccagatatttcatttgttgtttgtggtttggtatccactgtaaccgtgctccctttataaacctttaacacgtctgctcggaacttagcctcagatacgccatgactacgaagataatctattggatcttcatggtctgtcccacctaatttatacgtaatatccctatgtgtccataatcctttagagggatgaatatttcgttctcgcaagatttccccaattaattctatatatttttcatatgaacgtttaaatttcaatggatcacttgtctcacacaattccacatgaacaaatctagcatttgctgctggacctgccccccatgcctgatgttttgtagatgcaatttgaatcttctcatcccaatccactgcgtagtgaacaaacgctgaacgccatgtacgagactcatacttttgaatattaattgctggcgcctctggggtagctgtagaatgtgctacaacaccttcataagctccaacaccataacggtatggttgttttggtaaatcaggaataaatagaattctatcagcaaatacatttgtttcaattgataatactaaaataatagcaacaactatggataaaatatgcttgtatttctttttcattttctatcggcatccctttttataatttttgtatggtcaaataatccactagctgacaatccgataatcattccttgaaatagattcattttaatatcttgagacaaaaataaaacacctagcgtaatgccaagtgttaaattaaataacggaatatattttgtttgcagtccagttgtttttgcaatttgtgaaatccctacaacaaccccaatcattgctgtaatttcaatcattacatacctcctcctcgtatgataaagttaggttttttaggaaagggatttacctataaacccgtgatcttgcaatcgattttaaaaaatcaagcatctggaatagatgaagatgaaaaacgtctaaatgatgttttagagcaagtaagacattttaaacaagtagaatcggatggaataataactgtatcagttccctcaatccctacatggattgctggaggtgtaatgataggggtagcaagaaataatttaagtacgctggaaccgctattagcgcaattgcgccaaacggtagactataaaattacattgaatcgtgtagttggagttgcgtataataatattgctgaaatgcaaaatgcaattggatcagctattaatgctctcacctatatgtcagcacaatggcatgatttagattctcaatattcaggagtacttaatcatattgataaagcatcccaaaaagcagatcaaaataaatttaaattcttaaaacctaacctgaatgcagcgaaagatagttggaaaacattaagagcagatgcgtttacattaaaagaaggaataaaaacattaaaaatggatcctgtttcttcaaagaaataggaaagtatggttttattgttaagttttctaaaatatagagattttaaaaacatactgttaaataattaaatgattcgttatatatagaaaaggtggagttgtattaaggactctaccttttttgatgatatgcttctaatgagctaaaactttttgttcatttatttacaagaaggtgagattatggtgtatgtcattccatacgacagattcgctagggatgatattagttatttcttagcaaagcattacgaggaaattggttaatgcgttttggtgatgataatgaggagctcgatgcatttaaacagtgtatcttcattgggcgtaagcgtgctgctaagaaaaatgatacatactttaacgatacgctaccctatatcgatcaagctaagataaacggaaattttgtgttttttatagtatcaggtccatttttgttgttttgggggcacttcaaaatgttagctttatgggcatgaggctgtaaccaaaacacacggttagttagatggttgttcatctgaattttctattaaattaatctcaagtttatgaagatatcaagatttaatgttgtgtgatagtatagaagggaaaaaatatagataaatttggaaaaggaggatgcaaattggatgttcaaactactataaataataaagttactgaactgttaaatgcctggtatattgaaattcgaaatagaaatgttgcgaatgcatataaataaaaaaagaaattgagagttctatagaaaatattgaagaagaccaaaatctattactgtattattcattacttgattttggttataaatatttaatagataatttgagtgtagctaaaaatagttttgatcaaattgaatcttttaataaaccaactgacgatttcttatcgtattattatcatttttataaagcaatctactctaatgcagttggtgactacaatgcagccaaagagcattatgaaatagcagaaaattcacttaaaaatattccggatgaaattgaaaaggcagagttttattataaccaagctgtgttccaatatcattactatcaggcttttgtggctttccaacaagcaacaaaagcaaaagaaatatttactgaacacaatgggtaggaagtgaaaatcggttattgtaataaccttatggcgttagcttgtacgtatttgaaagaatgggaattagctgaagaactttatatcttttgagcgttttccgtgtgcatcaagtgagtatattgttaattttatctgtattcattttttattatgaaacattttaaggttgataaagttttattgtgtgggattattaaataaaaatgataaattgtaaatgtcaagataaacatgtacattttcgcttgtttaagcatgtacaaaatccaagcagctcaccccataaacttcatcaaaagggttatgagacctatcaaatggcagacactttcatcggaaactctctgcacttttcaggggaaggactttccagtcccagtaaagccccagtacaccatagagatattcgttactccatctctgccatccgatgctacgctttcgtcgtcgtttccttctcgttaacagtgtgcgaattttcatctccgtataatcacgtacttcactgaaagcttgactagagttcccaacccggaagtagttcacccatccagtcagtacggcattgatttgttttattaagtcttgtgctggcttcgctcctgcgttttgaatgagttcgcgaatttttgctttcactgtcgtgcgagctttcttcttcgggatcatgaaaacgaagaatccattcttatttcggttcggtattcgtctcaggtcaaatcctaaaaatccgaaggattctccttttaggacattgaccatctgagtcttctccagattcagttcaactcccaaaggctttaactgttcccacagtcgtcgtaatgccagttcagcccatccacttttactggagtgtccgcttacagcgataactatatcgtcggcaaaacggtgatagtttacagcttcgtaattgccatcagctgttttacgtcgaatggtatcaaatgtccaatccacttcattgaggtaaatgttcgcggctagtggagaaaatggtcccccttgcgggacaccgatctttcctgttgccttaattacctgttttacaagatgcataacctgtgggtcttggacacgtttcgcgattttctccaataatatgttgtgtcggattgtatcaaagtagcgtgacaaatcaacatcaattattatggtcatacggcgcaatatactgcgtcgtacttctgccaatgcctgatgtggagagcgtttcggccgaaacccatacgagtttggacagaaatcagcttcaaaaattgcttctaatatgagttttagcgctccttgtactacacgatctcgtatacacggaatttgcagagttcgcattttgccgtttgtctttgggatttctacttttcgattggcttgtggttggtatattccagcttgtaattcttcttgaatacccgttaagaatgggataactccttctagttctatatcagcaaaactttttccatcaatgcctggggcaccattgtttttcctcgcctgttgatatgcttcgtgaagggttgtaattttggtaatgtgggtaaatatcccccaaaaccggtgcgtaggttcagacttcgcctttcgatagattcgttgccttagttcctgcaaagtgatgggtgtttttgtcatagcacccttgcctcctttagtcatacgaaatgtttacaggttcggatcctttcctccccgcgtgttttgctgcacgcagatctctggtactacgatccgttccgccaccctgacacctaccgttctcacttcccgatcgcggttatagagacggtctcctcgatgagatttcttcatcgggtgtcgagggcttctccagtttccacattatctttctctccatgtcgccgctgataccccgccggtgagaactgccgttccagactcgtttcggtcagttcttgttgctttcgcacgttatcgaccgtctcagccaccggaattgcgtgtaacgaggctacatctacgttcactgtacgttacaacctggagatttgcccacatgccttttgcatgtgatgtcagagggcttcgccatgtcgctttcacttcatggcgcctctcaggctacgggagtggagtctattctcccgattggactttcaccaactagataatgtgtccttatctggacacgccaattagagcaaatgggtttacgtggagaaaagattgaagataaagcccttgcagcaggtggcgagcctattcgaaaagctatttctgaaatagccccaaggagtgatagccctaaaaaagcaacaaaaagcgagccgtggcgaacaggacaacatttggctgataatatacgggttacaaaagcaaaaatggagggcggcataaaaacaatcaaaattggtatagataaagcggatcgttccccctatttctatggaaagttcttagaatggggaacttctaaaatgccagcagagccatttatagaacctggatttaattcttcaaaagaagcggcaattcgtgctatgacagacatcttgaagaatgaaatgaggttgaatatatgatgaatttacgccccgaaattgtgcaagctcttgaaaataatcaggagcttgtttctttattgggtggaaaacgtgtttattatcgtaaagctaaaaatgctgaagagtttccgcgtattacgtttttcgaactagacaatagaccagatcgttttgcagataacgaggaaagcgaaagcgaaattacatttcaaatcgatatttggtcaaaaggcagtacaacagcaatccataaaaaagtgaatgaaatcatgaaaagtattggtttttcacgctatgcggttgctgatttatatgaagatgatacacaaatttttcattacgcgatgcgattcgtgaaaggagtggagttatagatggctggagaagttattaaaattagttcgactgtcggtgtagatagtcttgtttatgcgaaatcggtgaaagacgatgcaactggagtggattatgcaaccgttaagaagttagaaggtgctgtaaaagttaaaacttctaaaaaggtgtcttctgaaattatgtggagtgataataaaaagtcagaaatcgctgagtctgatggtgaagttgaagttgaaattgaggttcgaggtcttccattatccacaaaagctgatattgaagggtatccagaagttacagacggtgtattagatgaaaaacgtgagggcgaaaaaccgtatgtagcaatcggatggcgctttttgaaggcaaatggtaaatatcgatacgtttggttgttaaaagggaagctttcacaagaagaggaagaagctgaaactaaaaaggataaaccgaacttccaaactacgaaacttaaaggttctttcattgaacgtgattttgataacagatcgaagtttacagcggatgaagatgaacctacatttacaaaatctgttggagataactggttcaaaaaggtatatgaaaaaccagtaacaccaccaacaggaaagtagggggagcaaaagctctctctcttttttattaacgaggaggaaaagccatgaaattaacactaataatcaaggaagaaaagaaaaattttcatttaccggagtttattccagcacgtttaattcgtcaagcacctgaacttgctgatattccaaataatccaggtcctgaggatatggataaaatggttcaatatgtagtaaaagtttacggggaacaatttacattagatcaatattgggacggtgtggatgctcgtaaatttttatccacaacttccgatgtaattaatgcgatcatcaatgaaactgtgggagcggctggtggcacaccaggaactggagaagaaacaaacccaaacgcgtagagggaggggggctaacgttcagtgagtttatggacgagctctacctctctttattacgtcaggggtataaacacatgcccatcaacttaagaatttgcactacccccaagtgtcaaaaaacgttattcacaaatgtgtagcatcctagcccgagagggctggggtagctactaacccttacgggtcgcgataggtaaagctttgaagttatctctactttttcccccgccccacaccgtgcgtgcgactttcaccgcacacggcgttccatcggttcagattgataacccctaacaaatttagttagtatcatccttattctttgcctcgcgattaagataaggtgaacaatgagatatatttcaaatgtgtagcagctcacggtatttctttagtttcggtagtttgtataagatactgtcttctaagtccttttgatgtataagcttatggcatcttatgcacagggtggcaagattgctgagtttgttgattttctctaaaggtagtcgattattaacatgatggcaatgtatgttagttggaatcaaccctgtcttacatattcggcactttcctttgtcacgattatatgcataatcgcgattaagtatatattcaaagttatagagtcgtttatttttagtttgtctaagcatctgatacaagaccatttggttgatttggtcgttcgaataaatggttggtctcattttcttatcgaccttaccatgtcttctcgaataaattgtccttcctatctgtgtatagggggtcgtatcataattgtataggagtgctttagtactaggtgtaaaactcattttggttaatcctatcttaactccatcaacttcaacgaagggtactttggttttatgccctttatgcctatctttacgattatcaagattttcagctggagtaagcattttttcgaatactcctccaccatgtttgttcttaatagacttgtagaatgtatagcgtattttgtcatcgcatctaacgaaaattctagcagaatttcctatacggaaataattactaataccaataattttggtgttaataagttctatttgggcggcaacatcgtgagagctggttgttttccgaacattgtaggtatctcgaaggatttctctcattttagagtttaatttctttttgttcggtatagcttttcctgcaatacggtttttcagtctcatcttttcagctctgatgtcgaatcctaggaattgggctggcttctctctcatatcggtaataaatgttttctcctttgataattctaatttgagtatatgtttgtaatacttattgattttagtcaagagtgttcttgcctgtactttatcctcgcatagaattatccagtcgtcagcgtatctaacaagaaaacatttcttatgttttctaactacttttctaagtcctgtactgaaagcgtgtttaacagtataacgcgcgtagtgttcttcgaactctttagctatcatccagtcaaagttatttaagtatatgttagctagcaggggagatataattccaccttgtggagttcccaactccgtagggaaaagttgattatcttctagtacacctgcttttaacattttcttaataatggttaggaatctcttatcctttatgcccatattccacattatttcaacaagtttattatggttaatatggtcaaagaaacttttgatgtcaccttcgatggctacgtatgtttttgacctagaaatggtattcaagattctgcctattgcatagtgacatgaacgatagggacgaaaaccgtaactatggttgaaaaacttcgcctccgctatgggttctaacaccattcttgctgtttcttggattatcctatctatcatggctgggattcctcctcgtatattaatatttaagtcctatttcagacttagattttttctttaataagagtcctgtaataaataaaatacttggacgtctcaagatatttctagataatggtcttaggatcatttgggacaattcttaccgctcctgtggacttaccacataattaagagtgtttctcagtgaacgtgcgggactccctactcgcaggctgagcagcctgatcctcgaacctagatgttagtagctctagggcggctttcgattcaggacaagctctcatacacgaggttgttggtcggcgtacacactagagatatctcgagacgtccaagcaatgattctaaatagaagggaggtctcttacatgagattatttgttggtttagatgtaagttcgtttgatataaaagcttgtattttaaatggtgaagggaaaaagctagattccttttcggtcaacaacgacttgccaggtgccacagcgctcaaagagcgagtgttacagtgtatagccaaccaagaaattgaaacttttaaaatcggtctagaatccacatctgtttatagttttcatccatctatgtttcttcattatgatgaagacttacaacggtttggggcaaaggtatttctgatgaatccaaaacaaattgcaaatttcaagaaaagctattctgacatggataaaacagatgagattgatgcctttgtcatcgctgattacttacgatttggacggaatcaaatgtccatcgtaaaagaaagtcagtatgtggcactccagcaattaacaagatctcgttatcagctcgttagaatgttgacaaaggaaaaacaacattttctccaacacctaagttataaatgtaatacgttctcacaagaagtggattcttctatctttggcaacgccatgatggaactatttcttgagaaattcagtctagaagagctagccgacatgcctttagaggaactcgctgagttcctacaaacgaaagggaaaaatcgattcggtgacccgaaatgtgtcgcatcaaccattcaaagggctgttcgctcttcctatcgtttggataaggtcgtagaagactcaatcgatgttcttctaggaacatcaattgcggtgattcgtacctatcaacagcaaatcaaagaactagaaaaatccattaagcgaatcatggctggattaacgcaaacacttgagtccattcctggaattggtcctgtattcgccgccggtattatcgctgagattggtcaaatcgaaagatttgatgatgaaaccaaggtagcaaaatatgccggattatattggcgtacgcaccagtctggtcgattcaccgcagaaaacacttcgttatcccgtaatggaaatcattacttgcggtattacttagttgaagccgccaactcagtaagaaggcacgtatctgattatcaagaatattacgtaaaaaaatataatgaagtaccaaaacatcaacacaaacgtgcactcgttctaaccgcaagaaaacttgtgcgattggtggatgcgctactacgtagtcaccaactctttacgccagaaaggtgcgtgaaagtgtgacataaaacttgtcatcgctacctttcaattattttccagtaaattacatatattactggtttagtttcgtgatgtcttttttaagcaaataggcctttgataactttaaacgtttatattttttagttgacatattaccgcaggtctaaatccccttgctttccctaattatacaagaaatcgttataaaaacaaattatgaaaaaagactattatgtttatcccgctatccttgaaaagtcgtcagatggttacggtatttactttccagaccttcctggttgcgtttctcatgcagatacacaagaagacgctttaaaggaaggtagagaagcattaggacttcacttatatggtatggaaaaggataatgaatcaattcccgaaccgacaccaattgataaattagaattagatacagacgaaaattcttttttaattgatgtttggatgccaccacttagaaataaagacaaaacaacttataaaagaaaaaatgtaactcttccttcttggttagaagaatacgcaactcataaaggcgttaatttttccgagatccttgtagaaggtttggaaatgcatttgggcattaaagataaaaagaatacaccataaaggacgccatgagcgtcctctttttttatataagatatttgttactcatattcatatttttattcttctttgaaccgacactatagataggcacgtatcagctcaaagaagagcaaaagctctccttatggaccgtttaattattttgtattcctgcataatcacaattagattctaaagttctctttgtaattatttacttgccctataaacgccagttcattcaaacagacatccataaagctttattcggtaaccaacccattcaaattttacagttactattaaaaatagaaaagagcaaccatgcaccagtcgctcttacgtaaaattctatgctattactataattcattttttcaatagataccatatgtaaaacttactgtaagaaaagtgtaagttcctcagcaagctttatccttctagaaatttcagcatgcttctgatatacataactactactatagcctaattccctagctatagattctaatgtttttcgttgcacatacttaccaaatagaattttattttctagtccttcaaacttaccaattaatattttgaggtcgtactgatcgttcatcttattcgctagttcatattctatagccgctatgtgttcctctattttcgcaccatctgaatcagcagttaacttatactttgataaatcaccaacactccaacgcattaattctcttttacttctatgcaatttattttctaaataaatgatttcatcttccaactttttataatctttaaaccattcaaacaagggttggctcacctgcttcctctttcaccatgtaaactcatttcttcatgttacgtttatttaactgttttcttaaatgcccgtaactcacattaaactttttagcaatttcaatatatttcatcccatgttctttaagtttcatggtttcttcacaaattgtattccattcgtcttctgttctttgtatggatgttttaacaaaaactttaccacccaaaacaacccctatttcattcaatctcttccctacttcacactttgtccaacaatacacaaaatcacgagaacatttattgtcacactgacggcaatgattatctgttaatcctagtatttccatcctcgcttcttttggactcatatagtaaccattcctaacttatctacatgatataaataatcaacaggtgctctattagtttgtggtactatatacgctcttttctcaaattcctctcttggaatagactttcttcctccatcggattgtacagcacttaccactaaatgagaatggttggcatgccggagacgggaatggagcgggtaatcgctcgtctatcggcattgaaatttgtgaaaatcgtgatggtaattttgaaaaagccttaacccatgctgcgggtctcgttaagtttctcatggctcaccttggattaaagattgggaacgtagtttcccatcaacattggagtggaaagaactgtccacgtccgatatttaatcgaccaggtggatttgagggtttcaagaggatgattgaagatagtctaaacgatatggttgtagagaatcataacaaggatgcgggtacacaaggattaggaattgcttacatggaaggtgtaaatattaaccttcgcagaggacctagcacgagtagtgatgtaattcgtaaattgaacaaacctgaatcttatattgtttgggaagaacgtgagggctggctgaacctaggtaattcatgggtgaaatatgactcttcctatatttactttgcccgtagacaaacgagtaatattggtaaattagtggttgtagatacaaacgaattatgggtctatggttctgctaattggaatgataagattaagactgtaaaaaaaggggaagcatttacaattcaagatgaattgcaggtaaatggttctaacatgtataagtgtaagtatttctacattaccacaaattctcaatttgtatatgtaaaataggaaaagtggattttatatataagtataaaaagtaataagactttaaaataagttaacggaatacaaacccttaatgcattggttaaacattgtaaagtctaaagcatggataatgggcgagaagtaagtagattgttaacaccctgggtcaaaaattgatatttagtaaaattagttgcactttgtgcattttttcataagatgagtcatatgttttaaattgtagtaatgaaaaacagtattatatcataatgaattggtatcttaataaaagagatggaggtaacttatggataacaatccgaacatcaatgaatgcattccttataattgtttaagtaaccctgaagtagaagtattaggtggagaaagaatagaaactggttacaccccaatcgatatttccttgtcgctaacgcaatttcttttgagtgaatttgttcccggtgctggatttgtgttaggactagttgatataatatggggaatttttggtccctctcaatgggacgcatttcttgtacaaattgaacagttaattaaccaaagaatagaagaattcgctaggaaccaagccatttctagattagaaggactaagcaatctttatcaaatttacgcagaatcttttagagagtgggaagcagatcctactaatccagcattaagagaagagatgcgtattcaattcaatgacatgaacagtgcccttacaaccgctattcctcttttggcagttcaaaattatcaagttcctcttttatcagtatatgttcaagctgcaaatttacatttatcagttttgagagatgtttcagtgtttggacaaaggtggggatttgatgccgcgactatcaatagtcgttataatgatttaactaggcttattggcaactatacagattatgctgtacgctggtacaatacgggattagaacgtgtatggggaccggattctagagattgggtaaggtataatcaatttagaagagattcatttgtttgttttgtggtataagattgtacgttgttcttcttagatttaaagtgcggtgcgctgttttgttttttgaaaaagcgtgtatacgcatccgcaaggttgcgaacagacgactgaatcgcaatactatccacttcttttagccaaacaaattctttcttcatggcaggaagtttggcagagcatgtaccatatgttaaacctttcccagtttctttatatgcgtgatcccatagggataggaaatgattgaatacaaagcgagaacaacctatcgttttgttaattagaattgcttgtgcttgatttggatagatacgaaacttataggctttattaattatcatttgattcacttccatttcggtatatgactattatataccaaacgtacattcgatggatagtgaagtaacactttatgtatgtcgaacaattaagatggcttcttgccatcccttgttcgaagccaattcatctcccacctactcacttcgcgttccttgaggaaggagtcttcttggctaaaatgataaaagccttcctaattataggaaggcaacgttctaaaatgaaaacctatatttgattactaattaaattacctcaaactgataatatacacttttcccattctccctagttactttaatttcagcaaatcctttaccaatgacatccattctaacctttccattgccctgtactgtatatttgacaactttttctccatctattgttgtatgctttgctgcaactccatcttctgttctagattgaccaacacgccaacagtcactgcacttttttgtgctcttagatatcatttcattttttacatgtacgctgttagtagatgcatcagcaataccatttgtactcaacaaaattatggaagttactaaacctattcccagtttctttaacattatttcatccctcctgtgataattcataattttatattaaactgagattctttcaggtaactttcatttaccttacaataaccttaaatccctttctgtagatatcgaattctttggaagaaagaattcacattgtttatattgattttttaaacatggccatgtggattgcccctacattattagctatatgtacctttcagttcattttctgctattagttcatgtgttaaatagatcaaatacataatgactgagagaattagataactagcagttttacctttatcagcaattaaatgccttgcttcgactagaatcacttttattattaacaaaatctcactagctcaaatgtaataacttatgagtataagaatattttctgagctttaatataatgtaaaattagtaagaaacttatttcatgaaaaaatgttaactattaaagaattagaagtgattatatgaataaattattactatcgtgtttattagctatattctgtctaaatatcgcaggatgttctaatgatatgactatactaaaggatagttctaaaccttcaacacctacgaaggcgaaatgcattaacaaagcttggtacaaaaaacctatgccatgtaataggttatgctaaagatcataaggcgaatatgaatgtatatagtaaacaacatataaaaacattgtaattaattgttgtaaatctacctaaaaagactatcaataatgaagtgcaccccaattgttagacacataactaacaattggaggtgcattttttacctcgtatagtatgtttaaacttaatttttttactttcatgagagacctgtaaaataactcttggacgtctcaagatatttctagataatggtcttaggatcatttgggacaattcttaccgctcctgtggacttaccacataattaagagtgtttctcagtgaacgtgcgggactccctactcgcaggctgagcagcctgaccctcgaacctagatgttagtagctctagggcggctttcgattcaggactagctctcatacacgaggttgttggtcggcgtgcacactagagatatctcgagacgtccgaggaatgattctaaatagaagggaggtctcttacatgagattatttgttggtttagatgtaagttcgtttgatataaaagcttgtattttaaatggtgaagggaaaaagctagattccttttcggtcaacaacgacttgccaggtgccacagcgctcaaagagcgagtgttacagtgtatagccaaccaagaaattgaaacttttaaaatcggtctagaatccacatctgtttatagttttcatccatctatgtttcttcattatgatgaagacttacaacggtttggggcaaaggtatttctgatgaatccaaaacaaattgcaaatttcaagaaaagctattctgacatggataaaacagatgagattgatgcctttgtcatcgctgattacttacgatttggacggaatcaaatgtccatcgtaaaagaaagtcagtatgtggcactccagcaattaacaagatctcgttatcagctcgttagaatgttgacaaaggaaaaacaacattttctccaacacctaagttataaatgtaatacgttctcacaagaagtggattcttctatctttggcaacgccatgatggaactgtttcttgaaaaattcagtctagaagaattagctgacatgcctttagaggaactcgctgagttcctacaaaagaaagggaaaaaccgattcggtgacccaaaatgtatcgcatcgaccattcaaaaggctgttcgctcttcctatcgtttggataaggtcgtagaagactcaatcgatgttcttctaggaacatcaattgcggtgattcgtacctatcaacagcaaatcaaagaactagaaaaatccattaagcgaatcatggctggattaacgcaaacacttgagtccattcctggaattggtcctgtattcgccgccggtattatcgctgagattggtcaaatcgaaagatttgatgatgaaaccaaggtagcaaaatatgccggattatattggcgtacgcaccagtctggtcgattcaccgcagaaaacacttcgttatcccgtaatggaaatcattacttgcggtattacttagttgaagccgccaactcagtaagaaggcacgtatctgattatcaagaatattacgtaaaaaaatataatgaagtaccaaaacatcaacacaaacgtgcactcgttctaaccgcaagaaaacttgtgcgattggtggatgcgctactacgtagtcaccaactctttacgccagaaaggtgcgtgaaagtgtgacataaaacttgtcatcgctacctttcaattaatttccagtaaattacatacgttactggtttagtttcgtgatgtctttttttagtaaataggcctttgataactaaaaattcttttgtttttcagttgacatactaccgcaggtcttgcaggaaatgtaagcatttttgttgcttctctatataattcatcttcttccattctcttgttgtgtctttgtaatttttcttcaaaatcttcagatttacttatctttatcattctgtctcacctttatctaaaataagaattttgtaaaaaaattaataaattctccagcattgtgcactctatacctaaaaggactaattatgaaaattctaaaattcatcatctttacatttgcctggattatatatgctgcatttttgtatgccatattctttttatgattattttttatatacataagcttaagaattataaactctttaattttcatcttcccaaaataactattttgtccagttttctaatagctctacattctcatagatattaccttttacatgatttagatttaattcactccacagcaattcagcatgatccactccgttacaaatccaccaagcgccttccatctgcttaactgctcctgtgaatccatctgtttcttccatacgatcatgaaattcttgatagacaatgtccccttcgtaaatttcactgccttttacatcctcaattcccgtgtatcgaagtaactcaacatctttcaaaggagagatatacaccgcataacaaatgccatcaacgatatgtgccaattgcactctttctttagcaaagtctataaatccgacttcatacattttctccataaccttgtcccacgcccgaaacttaatatcttccatctctcattctcctttacgaataattttttttacattacacatactatctacgagtcagctacattctttcaaaacggagctttacccctccggactgtttaggcatttggcaggtgatttggtcaattacctgccattccgattaaaataacgcttttgttaaaaactttttgtccatgtaatcattagcaatgacttttctgttgacgggccacattgattctttatttctggatctaaccatctatccccgagatgatgttcagctacttcctgtgctatctcaataaattcccaatcagatatacccttcaaatattcaagagctttttctttatccatatcaacactccccgtttcttaacaaaattcaaatttgataacattccaggactccctcatttaagaaagtcctggaaatatagtttatttaacttgaaccaatggattagcttctccacttacttgtggtaacttgccatcccatttttcaatttttttaatttctacaatttctggagttaaagacttcttaataatctcatttgcttcagcttttcctctcgcttcctcaatggctttctctgcattgattgtagcttgctttttctcaatctctgctttttcaaggttttgttgagcatctactactccttgaatcgcttttgctgtatttgcatctggtttaggagcttctaacgtaacagaatctactaagaagccagtagtatctaccatttttctaaactccttttctattgccccattaatttccccttgatgttggaatacttcaagaactgaatagttagagaaaacgtttaatgtagctttcttaagtcgagtttgtaaccacccgttctcaatcacatctggggcctgtcctttgaacttgttataaatcttaggaagtttctctgcatcattcatgtaatcctctgatataatcagtcttataaattataagggctggtatataaatgaaattagatagtaataaccattcagtattcttgttatattatcaccttgtgttggtcgtgaaatacagaagaaatgtgtttgatgatgatatgtcagactatgcaaaagatatgtttgttcgactatctgaaaactataacatcacgttagttgaatggaatcatgatgtagaccacgttcatattttgttcaaggcacaccctaatacagaaatgacaaaattcatcaatgcttataaaagtgcaagttctcgacttattaaaagagactttccacaagtgaaaaagaaactttggaaagagatgttttggtcaagaagtttttgcttgctaactattggtggttcgccaatagacgtagtaaaaacatatattgaaaatcaaagtgaaaagtgaggtgaaatgatatgacaaagcagaataaagcatataaattccgtttgtatccaacaaaagaccaagcacatcttatgcgtaaaaccttcggttgtgtacgtttcgtgtataacagaatgttagctgaacggaaagaagcgtatgaaaaacataaagatgataaggatcaactaaagaaacaaaagcttcccactcctgcaaaatacaaagcagaatttgagtggttaaaagaagtggattcattagctttggcaaatgctcaactaaacttgcaaactgcctataaaaatttctttcgtggtcaaaatgacttcccaacattcaaaagcaaaaaagacagaaagtcttatacaacgaatgtagtgaacggaaatattatgttgcttaacggtcatatcaaattgccaaaactgaaaatggtacgtatcaaacagcatagagaaataccacaagaccatataattaagtcatgtacgatttctatgacacctactggtaaatactatgtgtccattttgactgaatacgaaaaagagatcgtacaaaaagaagtagaaacagttgttggattagactttgcgatggatcaattatacgtcagttctgaggatgagagagccaattatcctaagttctatcgtgaaatgttagaccgattagcaaaggcgcaacgagtattatcaagacgtacaaaaggttctattcgttggaataaacaacgtatccgtgtagctaagttacatgaaaaagtaacgaatcaacgtaagaacttccttcatcataagtctaaagagttagctactcattttgatgttgtagctattgaagatctaaatatgaaaggaatgtcgcaagcacttcattttggaaaaagtgtcgctgacaatggttggggtatgttcacttcttttttagcttataaactacatgaacaaggcaaacaacttgtgaaaatagacaaatggtttccttccacaaaaacatgtagcagttgtggagatgtgaaaaatatgtcattgtctgagcgagtctattcttgtatatgcggtgtaaatctcgatagagattataacgcagctatcaatatcaaaaatgaagcaatacgcctattggcgttagtatagatagcaataaaataacccttggaacaagggagttagctcggctgtcttaggacgaattcgttagctaccaaaagtaacgactaaccgagaagcccccacttcaaacagtccgttagggtgtatggggaccggattctagagattgggtaaggtataatcaatttagaagagaattaacactaactgtattagatatcgttgctctgttcccgaattatgatagtagaagatatccaattcgaacagtttcccaattaacaagagaaatttatacaaacccagtattagaaaattttgatggtagttttcgaggctcggctcagggcatagaaagaagtattaggagtccacatttgatggatatacttaacagtataaccatctatacggatgctcataggggttattattattggtcagggcatcaaataatggcttctcctgtcggtttttcggggccagaattcacgtttccgctatatggaaccatgggaaatgcagctccacaacaacgtattgttgctcaactaggtcagggcgtgtatagaacattatcctctactttttatagaagaccttttaatatagggataaataatcaacaactatctgttcttgacgggacagaatttgcttatggaacctcctcaaatttgccatccgctgtatacagaaaaagcggaacggtagattcgctggatgaaataccaccacagaataacaacgtgccacctaggcaaggatttagtcatcgattaagccatgtttcaatgtttcgttcaggctctagtagtagtgtaagtataataagagctcctatgttctcttggatacatcgtagtgctgaatttaataatataattgcatcggatagtattactcaaatccctgcagtgaagggaaactttctttttaatggttctgtaatttcaggaccaggatttactggtggggacttagttagattaaatagtagtggaaataacattcagaatagagggtatattgaagttccaattcacttcccatcgacatctaccagatatcgagttcgtgtacggtatgcttctgtaaccccgattcacctcaacgttaattggggtaattcatccattttttccaatacagtaccagctacagctacgtcattagataatctacaatcaagtgattttggttattttgaaagtgccaatgcttttacatcttcattaggtaatatagtaggtgttagaaattttagtgggactgcaggagtgataatagacagatttgaatttattccagttactgcaacactcgaggctgaatataatctggaaagagcgcagaaggcggtgaatgcgctgtttacgtctacaaaccaactagggctaaaaacaaatgtaacggattatcatattgatcaagtgtccaatttagttacgtatttatcggatgaattttgtctggatgaaaagcgagaattgtccgagaaagtcaaacatgcgaagcgactcagtgatgaacgcaatttactccaagattcaaatttcaaagacattaataggcaaccagaacgtgggtggggcggaagtacagggattaccatccaaggaggggatgacgtatttaaagaaaattacgtcacactatcaggtacctttgatgagtgctatccaacatatttgtatcaaaaaatcgatgaatcaaaattaaaagcctttacccgttatcaattaagagggtatatcgaagatagtcaagacttagaaatctatgtgtatggggaccggattctagagattgggtaaggtataatcaatttagaagagagctaacacttactgtattagatatcgttgctctattctcaaattatgatagtcgaaggtatccaattcgaacagtttcccaattaacaagagaaatttatacgaacccagtattagaaaattttgatggtagttttcgtggaatggctcagagaatagaacagaatattaggcaaccacatcttatggatatccttaatagtataaccatttatactgatgtgcatagaggctttaattattggtcagggcatcaaataacagcttctcctgtagggttttcaggaccagaattcgcattccctttatttgggaatgcggggaatgcagctccacccgtacttgtctcattaactggtttggggatttttagaacattatcttcacctttatatagaagaattatacttggttcaggcccaaataatcaggaactgtttgtccttgatggaacggagttttcttttgcctccctaacgaccaacttgccttccactatatatagacaaaggggtacagtcgattcactagatgtaataccgccacaggataatagtgtaccacctcgtgcgggatttagccatcgattgagtcatgttacaatgctgagccaagcagctggagcagtttacaccttgagagctccaacgttttcttggcagcatcgcagtgctgaatttaataatataattccttcatcacaaattacacaaatacctttaacaaaatctactaatcttggctctggaacttctgtcgttaaaggaccaggatttacaggaggagatattcttcgaagaacttcacctggccagatttcaaccttaagagtaaatattactgcaccattatcacaaagatatcgggtaagaattcgctacgcttctactacaaatttacaattccatacatcaattgacggaagacctattaatcagggtaatttttcagcaactatgagtagtgggagtaatttacagtccggaagctttaggactgtaggttttactactccgtttaacttttcaaatggatcaagtgtatttacgttaagtgctcatgtcttcaattcaggcaatgaagtttatatagatcgaattgaatttgttccggcagaagtaacctttgaggcagaatatgatttagaaagagcacaaaaggcggtgaatgagctgtttacttcttccaatcaaatcgggttaaaaacagatgtgacggattatcatattgatcaagtatccaatttagttgagtgtttatcagatgaattttgtctggatgaaaaacaagaattgtccgagaaagtcaaacatgcgaagcgacttagtgatgagcggaatttacttcaagatccaaacttcagagggatcaatagacaactagaccgtggctggagaggaagtacggatattaccatccaaggaggcgatgacgtattcaaagagaattacgttacgctattgggtacctttgatgagtgctatccaacgtatttatatcaaaaaatagatgagtcgaaattaaaagcctatacccgttatcaattaagagggtatatcgaagatagtcaagacttagaaatctataacgaaacaaacaacgtgaaacgtcaatttttattttagatgctagacaaactaactttattggagagtttgatcctggctcaggatgaacgctggcggcgtgcctaatacatgcaagtcgagcgaatggattaagagcttgctcttatgaagttagcggcggacgggtgagtaacacgtgggtaacctgcccataagactgggataactccgggaaaccggggctaataccggataacattttgaactgcatggttcgaaattgaaaggcggcttcggctgtcacttatggatggacccgcgtcgcattagctagttggtgaggtaacggctcaccaaggcaacgatgcgtagccgacctgagagggtgatcggccacactgggactgagacacggcccagactcctacgggaggcagcagtagggaatcttccgcaatggacgaaagtctgacggagcaacgccgcgtgagtgatgaaggctttcgggtcgtaaaactctgttgttagggaagaacaagtgctagttgaataagctggcaccttgacggtacctaaccagaaagccacggctaactacgtgccagcagccgcggtaatacgtaggtggcaagcgttatccggaattattgggcgtaaagcgcgcgcaggtggtttcttaagtctgatgtgaaagcccacggctcaaccgtggagggtcattggaaactgggagacttgagtgcagaagaggaaagtggaattccatgtgtagcggtgaaatgcgtagagatatggaggaacaccagtggcgaaggcgactttctggtctgtaactgacactgaggcgcgaaagcgtggggagcaaacaggattagataccctggtagtccacgccgtaaacgatgagtgctaagtgttagagggtttccgccctttagtgctgaagttaacgcattaagcactccgcctggggagtacggccgcaaggctgaaactcaaaggaattgacgggggcccgcacaagcggtggagcatgtggtttaattcgaagcaacgcgaagaaccttaccaggtcttgacatcctctgaaaaccctagagatagggcttctccttcgggagcagagtgacaggtggtgcatggttgtcgtcagctcgtgtcgtgagatgttgggttaagtcccgcaacgagcgcaacccttgatcttagttgccatcattaagttgggcactctaaggtgactgccggtgacaaaccggaggaaggtggggatgacgtcaaatcatcatgccccttatgacctgggctacacacgtgctacaatggacggtacaaagagctgcaagaccgcgaggtggagctaatctcataaaaccgttctcagttcggattgtaggctgcaactcgcctacatgaagctggaatcgctagtaatcgcggatcagcatgccgcggtgaatacgttcccgggccttgtacacaccgcccgtcacaccacgagagtttgtaacacccgaagtcggtggggtaacctttttggagccagccgcctaaggtgggacagatgattggggtgaagtcgtaacaaggtagccgtatcggaaggtgcggctggatcacctcctttctatggagaattgataagtctgtccaaatgcaggcttatctcaccgcaacttgtcaaaacatgaaaaaaaatagccctccatctgaccaaaaaaggtctggtggagggccatttttttgaaactctattattttatattgtttttattcgctaaaatcaaaaacaaactcatcttatgaccgcgtttcttcttacgaaattaagtaattgtttcaatagctggttttttagtcatagaattactttatctctcagctttattattctgttctttcgcctaaaattccaatatccccattacttccttcgtaaatagtttgaaatcagttaaatgtttttcaataatttgacgaacaatatctaaatttacactttgataatcatgaacagcaatattacgaaatccaaccatcgcctttaacttatttgctagatcagcgctaaggaatcctgctgtaaccaataaatcaaaggcctctcgactagattggggtagtcctaattttttcccagcaacaatatgcattgctagatcaatactcgcttcacaagctctttgtatattcaatattattgaatcttgttttgtaaagtcctctaaattttcagggtcatttccatacacatcttggattctttttatacaacgctctattgtagaaattttatttaaaataacctcattcttcatatatagaacctcttttctttatatcatcaaatactacctgtcgttcttcattcaattttgaatacatttttaaagttttcatttcaaaaataaccttacgtttttcatcggaacaaaatattgtctttcctgtatgtataatctgagcttgaaaaactgtagaagcttcggataaatcaactaaatcaacatccctctgaacaatgttagctaactcctgtgctaataaaaaacgttcatagttccctaatgttgtgtcacttacataagctatatcaatatcactatcttctcgttctctgttctcagccgttgatccaaacacaattatccaatagggattcaccgtctcttgtaatttttctataatagctgttatcatgctttgaaaaatcatttaattaatcccccttattgtacttgaattttattatatcataaccaatcataaatcctttaaacgactataaatacgtaaacaaaattaagcttttttagtacttaactcctcacaaaatcagaagcttatttctgacctaaaattattatagttcaggagtagatatattgtagctttggatcttaaataattgttaataatccaacactttcctgttaaatgccttttttattttcttcctgcaaaattaaaagactgacaataactgtcagcctcttactttaacaactctaaagaactttcgcctatttcacaatatacattctaatagtttgaggatatattgctctattgaactacccccactttcacttcgtttagaagtgagggattcctaagtaaagagttctatcgaactctaattgattaggctaaccccgcagtccttgcggttagaagccttatcgcttcatgctttagattgatacttgcgttaatatccctatcatggtgtgtacgacaagaaggaaaagaccaactatgagaagtcaaggggagttttttatataaatagggggtgtttttctaaaaaagggcgtgccaaataaacctaaggattttcaaaaaaaatgaaaaggtcatgtttctgttgtgtgaggtggtacttcataaggcttattgcttttaagaatggcatagataatgtaacacagctttctagctaccgcccctatacaaacatagtagtgctttccttgctttcgtttcttttcataaaaagcttttaatacagggtcatgtttatgcgctgtaatagccgcttggaataaggctctacgcaaatgagaagaaccacgtttggatatagacgtacctgaggcttcaaattgtccagattgggacacagaggcatcaatgcctgcgtaagcgacaagtttagatggtttgtcaaagcggtgaatatccccaatttcacttagtatagtggctcctaaaatgggcccaacaccaggtattgtcatgataggagtatctaaatcaattaaaagttgtgacatttcttcttcacattctttgatttgatcttcgataaaacgaatttgttccatcaacatttttagttggaaggaaaaagcgtctttacagaaggtaacaccaaacgaattagaggctaattccattagcttgttggctgttttcttccccagtcgattacgactggtttgctcaattatttgtgttaaatcatcaatagatatctgttcatagtcactaggagaggcatattcaagtaagatttgcgaagaagttttaccaaaaacatccgaaaagatgctttggtactctgggaaagtctgatctaatacgacaagagcttttcgttttaaatcactcatattacttacaagcgcattacgaaagcggctcatttgttttagagcgaacattttctcgtccacaagtggggtttcaacaaaacggccgaatcgaatgatatcggcaatcatagtggcatcaatggcgtctgtttttcgctttctaatttctgttccttttcgccaagcattggtttgaattggatttaatacaacgactgagaagccatgatcaagtagaaaagaataaacggctaaccaataatgtcctgttgcctccattccaatcagtatttctgtaggagactcaatatattggtacatccaatttaacagtgcttgtccgccttctttatgattctgaaagggaaatggcttagtaataggttttccagtttggtcgataatggacgcataatgtttatgtttagcgatatcaatacctaaatagaacatagcttacacccctattttaatcagtgttagatagtgttgtcctcctctgaactaataagcgctactacctcgtaagagatacgaagaatgaccaatggtcatcaacatccaactcattcgtaaactacttattagacagaggtaccattctttcaaccgaatacaaagattcaaggaggtggtcggcaacactctatctacaaatataagtatctcatataactagatactcacgggtttataggtaaatccctttcctaaaaaacctaactttatcatacgaggcctcgtatgattaagttaggtttttagggacgggatgtacctataaatccaagggtatctatttttatgagatactaatatttgtagatagagtgttgccgaccatctccctgaatctttgtattcgtaaaaaagagcggtacctctgtctaataagtagtttacgaatgagttggatgttgatgaccattggtcattcttcgtatctcttacgaggtagtagcgcttattagttcagaggaggacaacactatctaacactgattaaaataggggtgtaagctatgttctatttaggtattgatatcgctaaacataaacattatgcgtccattatcgatcaaacgggaaaacctattactaagccatttccttttcagaatcacaaagaaggtggacaaacccttttaaatcagatctaccaatacattgagtctcctacagaaatactgattggaatggaagccaccggacattattggttagctgtttattcttttctactggatcatggattttcagtcattgtattaaaccccattcaaaccaatgcctggcgaaaaggaacagaaattagaaagcgaaaaacagacgccattgatgccactatgattgccgatatcattcgattcggccgttttgttgaaaccccacttgtggacgagaaaatgttcgctctaaaacaaatgagccgctttcgtaatgcgcttgtaagtaatatgagtgatttaaaacgaaaagctcttgtcgtattagatcagactttcccagagtaccaaagcatcttttcggatgtttttggtaaaacttcttcgcaaatcttacttgaatatgcctctcctagtgactatgaacagatatctattgatgatttaacacaaataattgagcaaaccagtcgtaaccgactaggaaagaaaacagctaacaagctaatggaattagcctctaattcgtttggtgttaccttttgtaaaaacgctttttccttccaactaaaaatgttgatggagcaaattagttttatcgaagatcaaatcaaagaatgtgaagacgaaatgtcacaacttttaattgatttagatactcctatcatgacagtacctggcgttggaccaattttaggtgccactatactaagtgaaattggggatatacaccgctttgacaaaccatctaaacttgtcgcttatgcaggcattgatgcctctgtgtcccaatctggacaatttgaatcatcaggtatgtctatatctaagcgtggctcttctcatttacgtagagccttattccaagccgctattacagcccataaacatgaccctgtcttgaaagctttttatgagaagaaacgaaaacaaggaaagcactactatgtttgtataggagctgtagctagaaagttgtgttacattatctatgccatcctaaaaaacaataaaccgtatgaaatccctcaatattcaaaagaagtttgatacttttatttttttaacatctcttagggttatttggtgcaccctttttttaatttcctatttataaaattcctcttgacttctcatagttggtcttttttattagtgctttattttcgattacaagtaaagcatataccaaataaaaaaagaaaaagcagagatattttcatcgataggtgaaaatatctctgcttgattaagttgctctatacatatgtattactagaaaataacatagtaaaacggacatcactccgtttcaatggaggtgatgtccgtttttcattacaacaaattacttatctatttgtaatgctgctcttggacaattgatttgaaaacgatatttaaacctgagtttgcatgagactattcctccataaggagtaattccacgctgtccacgataaatgttccttccgtttctccaatctcaatccataccttatcggtttctgggaagtattctaattcttttgtcacataaccaactggtagtggcgtgtaatccctataccctctgttaaattcacaaggattctctcttcgtccatctgtatacgatttttcttcatagactgacgcataatcagctggtacggaaggagcttcgttatatcctcgattacgagaagtgtacgcacctccgtattcttcttgatttacagtataatcattacacgttaccgtgttatttggatagatttcctcttctacgcagttgctaaacttcagttcgtctgtattgttctcgatctcatgaatggttacgcaaccttctccatatccctccttgtacgctgtgacacgaaggatatagccacgacccggacagacacgaacttcttgtgacacttctgcttcccattccggaacaacaaggaccgaacgttggttgttttgttcttctacatctacatgccctttcacgttccagcaggataagccattattaaaatcaccatttttaatgacatttctcgcatcatatagggagaatgcagtgaaaatacgcccttctaattcttcaaaaatagccgcattgacacccggaatcacagacagctcaggcagataagcttctcgaatgctatgaacacgtttatctgccgcatgaatcatggcaatattcgtatccgcttgtaattgatcatattgagagtttacaaataaagcatctacagattcttttgcctctttataaacgatatttgtttcccattccaatttttcacgtttgtctctccattttttctccgctcttttcacacgagctagcgcttctcctactaatggtttctcttcgagaaactctagattccctagtcttgcgtgcccatcttgcgtcttaatcttaaagatcacccatacacctaggtcctcatttaagtctgtacatcctacatcaatgtctaaggagaaatgatgcgaatgatgggcacacttttctccatccctacacgaacaatctaagtcaggattccattcaaggtgtggcgcgcatcgattcggctctccacactttccgattggactttgggctgaaagcggccataaggaacccgtacctggcacatttactgtttcatgttttgcattgtagcgaattaaatagatttctaagtcttgactatcttcgatataccctcttaattgataacgggtataaaatgtaccctatagaatagacacttgaaaaaagtctattctatagggtatttcttgtataataaaaggaaaattgggatcggagaatgttgaaaatgacaaaaaaactatttacagaaagagaaattcaaattctatcaaataacctatacgtaaaatctgtaagtcagaaaggtatcacttatacagaggaatttaagcatatttttattgaggaaaatgaaaaaggaaagctacctcgaaatatttttgaagaatgtggttttgatatagatatgattggaatgaaacgagttatgtcatcgggaagtagatggcgtgctgcttatagaaaaaatggtgtattgggtttaagggatacacgtatcgaaaacgctggaagaactcttgagagagagcttacgttagaagaaaagtatgcccgtttagaagccgaacgaaacttactaaaggcggaaaacgaattgctaaaaaaaatcaaacttatggaagggaggatgagaaggaaataacactaccacctagtcagaaattcatcttgattcgttctgtcatcatgaaatacaacttaaggaatatggtcagtcatttgtgtaaagtagctggtgtatcccgttcgggatactataattacttttcagtttcatctcaagaacaacggaaacaaaagagtgatcgagatgaaatcttgaaggaaaccatattaaaagcacttcgatttagaaatagaaacaaaggggctcgtcagataaagatgacattggcgggtcagtttcaagttgtctacaatttaaagcgtatccgtagaattatgaagaaatacgagattatctgtccggttcgcaaagcgaatccttataaaagaatgcttaaagctacaaaagaacatcgaatagtaccaaatcaattaaatcgggaatttaaacaaaataccccagggaaaacacttcttacagatatcacctatttagtttacggtaagaatcaaagggcctatttatctacaattttagacggctcaactaatgaaattttagcttaccatgtttcagaacagatgacattagagctcgtaacgacaactctccataaactaaaaaggaatccgcggattcgattgactgaaggtgcttatattcattcagatcaaggatcccactacacaagccctacctatcaaaagctagttaaaaagctaaacctaggacaatccatgtcaagaagaggaaactgttgggataacgccccacaagaatcattttttggtcatctgaaagatgaagctcatataaaaccttgcgtgtcctttaatgaattgaaacaagagattaagaaatatatgacgtattataatcattatagatatcaatggaatttaaaaaagatgactcctgttggatacagaaaccatcttcttgatgttgcctaacttttttcaaaatgtcctttacaaagggtacagattatgtggtgtggtgaatacatcgtcagagtcctccgcaatcataccgtaattaattggtagtgtaatagattcccctgactcgaagcgttcaacatctcttataaagtgatactgtttgatgtttacagagttgattttatctaaagcagagaatggaaggtcttctatgtccgttttaagcgtacgagaagaattagggataaattcttgcgcccacatacgtcctgtagcagatatattttcttgcgctcgtaatgttcttaattccatatctttccatcccttacccatcatatctttaatctgcaggccattgttataaccttgtacaaaacttgaccttatcattgcattacccataattaaatcatgatcggtggcgccgtttacgaaatgtattttatagtcactgccttttcttttgaaagtaaactgccccgcgttatttgtaaaaatatgtggttcagttgtagttacagagaagtaaccatatcctggagcccatccttcagattcaaaaataatattattcaagttttgaaaacgaaattgtccatcagaatatacgctcagatgtccaccgtcattatgcatttgaatatagtttgaccaaatattagttccttctgcattttctcctttagaaatcccaaatttcgcatatgctttagaaggttgatcaactccattaattcgcggcatgacttgataaatataaaatgatcctgtaccagcgtattttctattatcagaaccaaggactaatgaaggttgaatacttccatcatctgtttccataaatcctatatagccacgtggcttatctaaatcgaaaatcttcatgtcttgcttatttatttcaacaaatctgtttccacttgttttaagcgttaccccttctaaaacttttcctttaatatgatttgctgtaatgaaacctactaagttaattctgttcgcattcaacgtaatgttttctttgctcatattaaatgctgcaattacatcgttctcttttacagatagactaacgcccttttcagttaactgaagacgggtttccatatctcttacataagaatcttttgcaaattgtccatttgcttgctctattgtgtatacttctttcttttttgctgcggcattgataccctcttcattgatagtgaaacggttgtcgatcatagtcattttctgattaaattgttccgttgcaagtttattagctagttctcccaacaaatcttgtttatttttatcaactatttgcttcaactcaggtatcttaaacccagcaacataatcttctacttgcttaagttcaactttaccttgcagtgctttcgcagtattttcccatccagctttcgcctcttgtaattgtcttccttgttctgtctgcgtattttgtatgaaagagacattttgtttaatggtagttgcatctttttctacagttgaagtgcaccccaattgttagacacataactaacaattggaggtgcattttttatggctaaattttcttcaaaagataaaatacaagcagtaaaacgatatctagaaggtacggaaggcggaaaaaccattgctaattctataggggttcatcctagagaactttatcaatggattaaacggtttgaattttcaggggaaaaggcgtttgaaaaacgctatacaacttaccctctcgagtataaactagatgtaattcattatatgaatgaaaatgggacatctctgagagaaacagctgctttttttaatattccttcttgcgaaacactccgaaaatggaaagtagcttatgaaacagaaggattagatgccctaaaatcaaagaaaaaggggcgtctaaccatggccaaagaaaaagctaagctccaacatttaaaacaaaacgaagtatttcttgaaggttctatagaagcgctacaagcagagaatgaacgtctgcgtatggaaaatgactatttaaaaaagttgaatgccttagttcaaaagaagaaaacatcacagaccaagacaaagcgcaattgatttatgaattaaggcataaatataaggtcgttgaccttgtgaaagtcgctaatatcgctcgtagtacgtattattactggatgaaacaagcgaaacgtccagataaatataagaaagttaaagaattaattaaagagatttttagtgagaattttgggaggtatggttatcgtcgtattacattggaattacgtaatcgaggccatgcattaaatcataaaaccgttcgacgtttaatgaatatcctgggattaaaatgtcttgttcgattaaaaaaatatcgttcatataaagggactgtcgggaaattcgctcctaatattttaaaacgtaattttcacgcatcaaaaccaaacgagaaatgggtaacagatgtgacggagttccacttacatggtaaaaaactatatctatcacccattttagacttatataacggagaaattatagcttacaatatagaacatagacctgcctattcccttgtttctaaaatgttaaataaggcgtttcaatgtttgaatgataaggaaactcctattttacactcggatcaaggttggcattatcaaatgcgacaatatcatcagtcgcttaaaaaacataacgttatccaaagtatgtcccgtaagggaaattgcttagataatgcagtcatggaaaatttctttggcttattaaagtctgaattactttatcttaaagagtttgaaagtatggaacaatttaagcaagaactagaaacttatattcattactacaatcacaaaagaattaaaacaaaactaaaaggattgtcccctgtgcaatacagagttcaatccttagtagctgcttaatatatttgtctaattttttgggttcagttcaaaaaaacaaacgattctttcaacaagctgtcgaggaagaatcgtttgtttttttatagtgagtatctacattcctacacaatttttgtaggtttaattaggttcaatgccaaatataattaatgtttaattttctagatatctgtatagtgtggatttgctaattcctgtttcatcttttatttgagcaagactataatctccactttgatacataacaatcgcacgttttacattttcatcaggttttcttggtcgtcctggagtgattcctttctgttttgcttcgtataagcctttttttgttttttcacttatcacgtcactttgaaaattaacaagatgatttaaaatcaagctgaattgatatccagcttgattgcttgtgtcgattccctcagtaagagattgaaagtaagcgcctttcatatcaattttttctattaactccaccagatggcgtgttgaatcagccaatgtaaaaagttttgtaacgactattttatcacctgggttcaggttacttatcataattttaagatgtgttcttttttttgctgatgaatgttcctctgaaatgatttttgtgcactttactttttctaagttttttagttgtccctcgcatttcagatcatcttgatatggtctcatatatccgattaacatacatgctctcctaacagttaagatgtttcttttatcataccataacttggcgtcgaaaaatcagtatcaaaaaggttcctttttgggacgataagtgttagactgtttttattaaatcgtgaacgcggcttttatgagacttaaaagccacaaaataaatgatatgaggtgtataaaacagtggtagaaaaattaaaaacagaatggttttctaatgttagagcagatatcctcgcggggattgtagttgcactagcattaattccagaggcaattgcattttccattattgcgggtgtagatccaatggtaggattatatgcatctttttgtattgcagttattattgcctttgtaggtggtcgtcctggaatgatttcagcggcaacaggtgcgatggcattgcttatggttcctttagttaaagaacatgggctgaattatttattagcagccacaattttgactggtgttatacaaattatttttgggatatttaaagtagcaagattaatgaaatttattccacgtgctgtcatgattggttttgttaatgcgttagcaattttaatttttatggctcaagtaccacattttattggtatttccaatctgacatatgtatttgttgcgattacattagctattgtctatattgtaccgcgatttatcaaatccattccagctccgttaatagcgattgtattattaacagctgttacaatttttatgcacctagacttacgaacagtcggtgacttaggagcgattacaagaacatgaagtgcaccccaattgttagacacagtctaacaattggaggtgcattttttatggctaaattttcttcaaaagaaaaaatccaagcggtgaaacgatatttagatggtacagaaagtggaaaaacaattgctaaatctataggagttaaccctagcgtacttcgtgagtggattagacgatatgagtcttcaggtgaaaaggcctttgaaaagtgctatacattctacccagcccagtataaactagatgtactttattatatgaatgaacacgggacatctatcagagaaacagcggcacttttcaatataccgtcttatgaaacacttcggaaatggaaaatagcttatgaaacaggaggattggatgccctacaatcaaagaaaaaggggcgtccaaccatgaaagataaaaaaataaagccagtagatgaaggatcaatcgaagccttacaagcggaaaatgagcgtttacgtatggaaaatgcatatttaaaaaagttgaatgccttagttcaaaacaaagaaaaatcaccaaacaagacaaagcgcaagtaatctacgagttaaggcatgaatttcctatcaaggagttacttcaactcgcaaacattccacgtagtacgtactattactggatgaaacgttttaatcgtcctgatccaaatgcggaggtaaaagaactgattcaagctatttataatgaacacgatgggtgttatggttatcgtcgtattcgtgatgaacttatgaatcgtggacacaaagtaaatcataaaaaagtgtatcgccttatgaaagaattagggttaaaatgtctggttcgtatgaaaaaataccgctcttacaaagggacagttgggaaaattgcgccaaatattttaaatcgcaacttccaagctgaaaaaccaaatgaaaagtgggttacagatattacggagtttaagttatttggggagaagttatacctatcaccaatgttggatttatttaatggtgaaattatcacgtatacaattggttcaagaccgacctattcccttgtttcaacgatgttggaccaagccctttattgtgtaaccaatccggataaactcctcattcactctgatcaaggttggcactatcaaatgaaacaataccgtcattctcttaagaattgtggcataactcaaagtatgtctcgcaaaggaaactgttatgacaatgccgttattgaaaatttcttcggtatcatgaaatcggaatttctgtatcgaaaagaatttgaaagtataacacatttcaaacaagaattagcaaagtatatagaatactataatcataaaagaattaaggcaaaattaaagggtatgagcccagtacaataccgggctcataccctagaggctgcctaatgaaacgacctgtctaactttcgggggtcacttcacgtttttcatcttcatctattccagatgcttgattttttaaaatcgattgcaagatatctttatgacctccaaatgctcggacatcttctccaatactatctcttaacttagctagttcttgaattaaattctgtgtatatgcttggttttgtttaatctcaccttgtaaatctgtaatgccttcttttaatgtatctgcatctccttcattaattgcttctactaatgtatcgtaataattgtcaaatgtggtatcatactctacaattcctgtaagggtatctaaaagttgtttttttatgtgagcatcccattttgtagcatgctctcttgcattcttttgatcttgtgcaatttgactaggtagatttgtatatcctttaatatcaattccttcaaagttaacatctggattattaattaacaaataagagtaatcattcatggattttgcaaataccccagcatcttgcaaagcttttttcatcttttcactgtttacagaaagagatatatcttccgtactggtttgttctattttactttcacttgcaaaagcagctactggtgaaactacagtagttgttgtcagggttaaaaacgtcgatacagcaagtagtttataaggaaaattattattcactttaattcctcctatgaatatatattaatttttagtttgttttttcttgtttaaaagcaatgtcttttgaaatgaattctgcgtccttatgaatgtcattccaactttgtttagcagcttttaaatcgtcaggtattaacgaaagtttatgttcttgcatttgatcgatattatcatataaatctttataattagcccccattttattccattgttgctgaatacttgttagagacattattgcttgatccactgtctgatacaaatatgttagagtgtctttcgtattagtaagtgaaataaccgcttgattagccagatcagctttcatacttaattctccgattttattcgaaatttcattataagaattcatatgattagatgcctcgacaccagctgctgttcctaaaccgataccagctgctcctagagctgtaagaccgccaacaacagctggtgtagctgtaccaccagtcacaacaattactaccgctcctgcaatcgttccaataactaaaatagctgctcctagtccaccgccaattgaccaggctaatacattatcaaaatgtgatttctgtgtagaacgtaaattctcaatttcggcctgaagttgtgggactagtgcttgttttcccgctaatatagccgtcaatcctccctgtccatctggaccaccaacattatttttaaaatctacagtatttgtatacaactttgttttgaaagcctctaacatcttaatgacgattttgtacatgcttaaacaagcgaaaatgtacatgtttatcttgacatttacacacagatcactgttaccaaaatatttactacaaatttttaaaaaaatgtactgcacaattgtattgaatgatatttttcagtccacgacagtaactctggcgctccatctacaaaaacatcctattttttcttattcccccttttcgaggggatgggcaaaaacacccattttcaatatatttctttactacgtctattggcgaaccaccagtagtgaataagcaaaaacttcttgaccaaaacatttctttccaaagttttgttttcacttgcggaaagtctctcttgattagtcgagaacttgcacttttataagcattaataaattttgtcatttctgtattcggatgtgccttgaacaaaatatgagcatggtcaacattatgattccactctaccaatgttatgttgtaattctcggataacctgacaaacatgtcttttgcataatctgatatatcatcattgaatacatttcttctgtattttacaaccaatacaagacgataatacaacaagaacactgaataattaatattatctaatttcattaatataccagtccttattatttataagactgattttatcaggggaaatatcaaaagcaaagcccttttgctccgtcaaactgaaattcatctcctacctatcgttgggctacgcttgaggaaggagtattctttcgtgggatacgttaaaaatcacaacactattgtctacaaagattttgttttcatcaatttatcattttagccaagaagactccttcctcaaggagcgtgaagggtcacagcccagtgagtaggtgggagatgaattggcgtcgaacaagggatggaaggaagccatcttaattgttcgacatacagaaagtgttgctccactatctatcgaatgtacgttcggtgtgtaatagtcatataccaaaatggaggtgaattaaataatgattaataaagcctataagtttcgtatctatccaaatcaagcacaagcaattctaatcaacaaaacgattgggtgttctcgctttgtattcaatcatttcctatccttatgggatcaagcatacaaagagacaggaaaaggcttgacctatggtacatgctctgccaaactacctgccatgaagaaagagcttgtttggctaaaagaagtggatagtattgcgattcagtcgtctgttcgcaaccttgcggatgcttatacacgctttttcaaaaaacaaaacagcgcaccgcgctttaaatctaagaagaacaacgtacaatcttataccacaaaacaaacaaatgaatgaaaaagacaattggtgatgcgcttgcccctgtggttagtgtttttgttgctgggttgcagaaacttgtggatggattcaacgcattacctggaccagtacaaaaggctatcgcaattacaggtggtattgttcttgcacttacagcaatagcaacagcaataggtgtagttcttgctgcattcgggatgattatgtcaggaattggagcattagcaacagcattaggaattgctggtggtgctgcaggtcttgctggtgctgcggttggtgtgttaggaagtgcattgggagtgcttcttggacctgttggtttaatagcagcagctcttattggaactggggttgtcgcatataaagcatatcaaaaagcaactgaagacagtatcgcttcagtagatcgttttgctacgaataataagttagcacaagatgaatatcaaaaagctttagctagttcagatgcagcaacaaaaaaatatatgaaacaacaaaccggagaaattagttcatcgactaaaaaagttcttggcgactattttaagttatccgatggtattagacaaaagctaactgaaattaaactgaatcatgaagtaatgacaaccgaacaagctcaaaaacttggtcagcaatacgatcaattaactgagaaaatcattacaaaagttgatgagcgcaagcaaaaagaaacggaacgcttgagaaaattgtttgctgattcatatgttcttacgagtgaagaggaaaataaaaggctagagttattaaatcaaaaatatgaagatgagaaaataaaagtagcagaaaagaatcagaaaataaaagagattaatgatttagcggcatcagaacatcgagaaaagacacatagtgagaatgttgctattcaagctttacaagacgaaatggatagaatagctgttcagcacatgacacaaaatcagatggagcaaaaagtaattcttgagaatatgcgtgtacaggctagtgaaatatccgcaagacaagcagcagaagttgttgaaaatagtgctaaaacaagagataaagtcattaaagatgcggaaaagacacgtaatgacaaaatagcagaagccattagacaacgcgatgagataggcagtttaaatgcacaagaagctgaggctgtaattgccgaagccaaacgtcagtatgacagcactgtttcaacagcacgagataagcataaggaaattgtgagtgaagcaaaatcccaagctggggaacacgcaaatcaagttgattgggaaactggtcagataaaatccaaataccaagtaatgatcttttaaattcacatacccttcaagagcttttttcgtaccttcacttacaccatcaccaaagcgcctactgtcctcttctgctttttgtgcctttttcccagcatctacgaaagcaaaacctaatgcaccaagtccaattacaactccaccaattgttgcgacaattggatttgctataattgcaccaataccaaaagaaaggaacccaagtgcactaactacccccataactgccggggctagtaataatgctgtcccatatacttttttagagctatcatctaatccgttgaaccaatcagcgacacccttcacagattctttcaattcaggaatcgcttgtttagcgatatctaaaatcaccttaccaagtggttctagagcaatttgtagttctcttgttacagatttccattgcttagcgcttgtatcgtaaccatcgaccattttgttcattgcgccactgtagtttccaagacctgtttccatattatttagtgataacatagtagtagcttcaaggtcttcccatttcacgccgaaaagtgcaacgcctaactgattcactttaatttgatcatccgttgttcgtaattcatttaaaacagcattaaaaacatctttggaagtcgcttttccttctagcatcgctttccaaactttttgcgtttctttactcatttgacccattgcttctgttgtggacttactaccatcttttacacggataccaaattcttttacaacgtcattcacataatccaagttatatgcgccatttttcgaaccattaatgagaattgtgaacattccatctgcactaaaccccatttcatggaacaaaggaccatactcacttaaattatcaaatagctcatttgagtagtttaaaccctttacagaaccttgtgctaataaatcaaatgcttgttggccagataaaccaaagcgtcccattaattgggctgcaccacgagttacctcgtttacatctgattccattgtttctgctaagatttcactatcacgagttacttgttttaaagtatcatcatcattaatatccttaatattgcgctttactttaactaaagaatcactgacactagctaaatcttccccatagccttcgcgccatacttctttggctacagcactaacctttaaactttcttcccttgttaatcctaaaccagattgtaccttcttgttcgcttcttcaaattgacttgcatttacgtgcgcccataagggggcaaggaaaaacggtgattgcaagctgttaggtcaaccctaaaagacctagtatcacttggctaaccttggagggaaactgaaaggggacaacagcatgccaagaaagccgtaagttggctaaacatcaagtcaagactgagcggcaagatataaagtatagataaggatgaaagctaaactgcttgaatgatagcacaagggaggccaccgtaactagtctcgaaagatgtttataaacgagattcaacagatatcataaagatagtgtgagtcatcttatatgaatagggttatctgttgcccacttctatatggaagaaaagtgtgaacgtcacatccgacactatacgtgcaaattccttgtttactaaatggggattgtctaagttagaatgcctgcgaggctattgaggataacttcaagatgtaacagtcaagaagtatggctcatgaatatctaatatgacaacggagccttcgtagtagtcagagctagggaaagcctagtacagggcgaaggaaggcagtctgttagcttattaccaaattggggaggtgcgaaaggcactatgcaatgtccaaaaatagtactaagcaatctgcgaacgaagagtcttaataaggaatatcaatatacaagactttatcgtaatttatataacccagatttctttttattagcatacgataatctaagtaaaaatgatggcgcattaacgataggagtagaccaaaggtctattgatggtttttctatgaaggaagtggaagacttgataagtgttttaaaaagtaaaagctatcaaccatatccatctagaagaacctatattgaaaagaaaaatggcaagaaaaggccattaggaattcctagcttttatgataaattagtccaagaagttatacgtatgatactagaagcaatatacgattcaagcttttctagttcatcacatggataccgaaaaggaaagggatgccatagtgcgttattagagataaagcgcacatttacaggtagtaaatggtttatcgaaggagatattaaaggatttttcgacaatattgaacatcatactctagttacaattcttaaaagaagaataaaggatgaggcgtttatagagttgatctggaaattcttacgagctggatatttagaagaatggaaatttcataatacctatagtggagcgcctcaaggtggaatcattagtccaataagtaaaaaaagagtccatctgatatgatggactcaatactgttttatctggaggggatttttttatggcaagaaaaggacaatcatttcaaaaatatacagaagaactaaagcgagaagcagttcgtcttcgattagaagagagaaaatcattgcgagaaattcgtgaacaactcggtgtgaagagcgatgcccagattattgagtgggtaaaacgtgcgcaacaaggggagtcctttgatgatcaacgtggtgtctggaatcgaaagaattttaatagtctagaagaagaaaatgcttatttgaaggcacaggttgagtatttaaaaaagcgcaatccaaatctacacgggaaggaatggtcctaaagaaagaacgattttctcttatcgattcattacgccaagcctatccactccgatggttgcttcaaatcgcggaagtttctaaggctggctactataaatggcggaaatatcataacgtgcagcgtttacgtcagaaaagggatatgtggcataaagaacatattttatctattcatcgtcagcacccttactatgggtataaacgtatgactcgtgctttggctcgagaaggaatggtaatgaatcataaacgtgttcgtcgtcttatgagagagctgggtattcaatctatcattcgaaaaaaacgtccgttttatggaagaaaaacatctgtggtatttaaaaatcatttgaatcgagagtttcaagctgaaaagcaaaatcaaaaattcgtaacagatattacttatgtacgaatcggagaacaatttgcctatttgtcggctgtgttagatttatacaacaatgaaattgttgcctggaagctatcttcaagaaatgatttagatttggttttaactacattacgtcaattagaagggaagtcattaactactaagccccttttccattcagatcaagggtttcaatatacatctaaatcctacgcaaaacagttagagaaattaggatttgtcggtagtcattctagacgtggaaactgttttgataatgcgtgtatcgaatcattcttctcacatttaaaaacagagaagttgtatttagtgtgcccaaaaacatatgaaatggcctaccgagcaattcaagaatatattcaattttataatacagaaagattccaagaaaaacttcacggcctttccccgatagaatatcgggaaaaggccgtggcataatactctttttattatgtggaatcaattaaaaaagatacactggagcaggttaataaggatattaaactcacaaaagaagaattaaataagaaagtggaagaagcgcaaagtgaaaccaatggacaattcaaggaagttaaaaatggtctccaagaagtttcgcaaactattaaaaatgtacaaaactctcaaggtgaaattaataaaactgtttctgaaatgaaacagactaacgagagttttactagatctattgagttattaacaaaaaaagacgatgaaattactgaaaaattaaatacagtggaagatacagttgaaggtacaaaacaaactattgccgatgtgaagcaaacaacaaacgttttaacaaaaacaacaaatgaaataaagaatacggcgacttcaaataagcagaccattgaacaattacaaaccgacatgagtaacatttctgtaggttcaattaatctagcaagcgattcagaaacagggttaaacaaacagaatatgaccggaacatggtcagacagtaagcaaatgactctttccaataagattaattacagaaacaaaacgtttactatttccttcttatttactgggaaaatgacgaaactcaatgcaaatccttggtttggtgtggaaacggcaataacttatacagacggagagcaagaatggaaatctgtacgtgcagactcacaattaaagattaatgtagattataaggacgcacctctaactgttacgttcaaaacaaaagataaagatgtaactcaaattaggttttattattctggacgcaatattgatggtaatttaaactcacatcatgcgaaattggaagaggggaacataagaactacatggcaacctgctaatgatgaagttacttctaaagaaacgttcacgaaaaaaacaactgagattgagcaaaatgtgaagggaattaaagaaaccataacaaatgtagaaaataatcagagtggatttgataaacgtgtaacagcagtagagaaaaccgcggatagtatttcacaaagcgtcggtaaagtgcaagaaatacaaactcagcaagggaaaacgctcagtgaggctactacaacaataggtcaacattctgaagcattgaaattaactatgaaaaagaaagatgttgaggattatgtaggcggtttaggtactgtcaacgagttgcgtgatgctgattttaagttaggacagaaatattggttttggaataccagcaacaaaaacactaaccacaggggcaagcgcatcaccaattgtctttttcattgtcgaaaacgctgaatctagtaatgtaagacgtccctttaatgtatcaatcttagtggctgcaacctcagctgctgtcacttttgacatggcatcccacatgctgtttaccccattcgcaccttctttgaaaagaatagttgcaccacgtacagcatccgaaccaaagagtgtctctaaagccatactacgttgctggtctgttaaatctttcatcgattcatgaagggttcctgaaatattttctaaactttgaatatgcccctgttgatcatagaatttcgatgataggaaagcggagcttgttgctaattcacgaaatgttgtttcacattttttattccatttcttcgctccttctgtcttcattacatatccttcaagagctgtttcaatgtctcccacacttctagacgctggtgtaactccatttttaaccaagaaatcaaatcctgcttgcgcattataagtgatgagccccagatctttcatttggttatatgcttctttagtagtggggttcaacctcatcagcatcgtttttaaagatgtacctgcatctgaaccttttaaaccattctgcgcaaatacagctagagttgtagctgtatctttaaacgtcatccctgctcctgctgctactgccgatgatgccgctaaaccatatttcagctcacgtacatctgtagctgaagcattagcggctccagataaaatgtttgctgcatccgcaacagaaagatgatctgctttaaatgcatttaaggctgtggatgcaatctctgccgcttcacctaattctagttctcctgctgtcgctaagttaagagcaccttctaaaccaccatttataatatctgttaaactaactccagcttttattaattcctctataccttgtcctgcttgaacactagagtattttgttgtttctcccatgttgacagctaattcgcttaatttcttcatttcttctccagtagagccagatacagctttcacattggccatttgttgctcaaaattcatggattcttctacagctgattttaaaccccgacctattgcataagtcattccgccaaacaccataccgatttgcattcctgcattttgcaaatgattacctaatgtctccatacgattaccaaaattcaataaacgattaccttgctgtgaaaaagacaattggtgatgcgcttgcccctgtggttagtgtttttgttgctggattgcagaagcttgtagatggatttaactcattaccagggccagtacaaaaggccattgcaattacaggtggtattgttcttgcgctaacagcggttgctactgttatcggagtaataatgggggcaatcggtatggttgtttctggcattggttctttagcaatagcaatgggtgtagctacagcggctactagtgtaacgggcgcagttttaggaatattaaccgcagctttaggaccagtagcaattgctttaggtgtggtagcggccgctgttggtgttggggtattagcatataaagggtatcaaaaagcaactgaagacagtattgcttctgtagatcgctttgctacaaatacagaagggaaagtaagttcttctacaaagaaagttcttggtgagtatttcaagctgtctgatggcattagacaaaagttgactgaaattagattgaaccatgaagtaataacagaagaacagtcgcagaagttaattggccaatatgacaagttaggtaacacgattatagaaaaaacaaacgcaagacaacaaaaagaagttgagggacttaaaaagttctttgcggattcttatgtgttaaccgcggaagaagaaaataagcggattgaacaaatgaatcaacattacgaacaagaaaagttaaaaacacaagaaaaagaaaataaaatcaaagaaatcattcaaacagcagcaaatgaaaagcgtgaatttactacatctgaaaggatttctttacaagctttacaagacgaaatggataggacagctatccaacatatgtctaaaaatcaaatggaacaaaaggttatttatgagaatatgcgagtacaagctagtgaaattacagctagacaagcagcagaagttgttgaaaatagtgccaaagcaagagataaggttattgaagatgcgaaaaagactcgagatgataaaatcgcatatgcgatacgtctacgagatgagtcaggaacacttaataaagaagaagcggatgcagctatcgcagaagcaaatcgtcaatataatagcacggtttctacagcaagagataagcataaggaaattgtaagtgaagcaaaagcgcaagcaggagaacatgcaaatcaagttgattgggaaactggtcagataaaatccaaataccaagtaatgatattacccatttctgaccgcatagtgtttatgattgcaatcgctacatcttggactttgtacttaccagatttaattccatcaacaaattcttctactgcaacccaaccttgctctcctaaatcaatcgttttacttccatcttcaaatgtttttgcgatgtcatttgcaacttcaatagatttttcacgagttgactggaaaagattatcataaacaatattagaatttgcaattaatgactctccatatgtttttacttcatcagcacttttctttctcagatcagcttcttttgaagctctatcttgaagtcgcttgaatagattctcatttgtgctttcaattatttcggaattcttaacgtactctccgaatcctcgaccctgaattttaattttttcagtttcagccttcgtaatacctgttgttaaatccatctcaacacctttggattctaacactttttgcgcttgttgaagttgttgctcatacccttttgttatcaatacagattgctcagagtattttttgttaatttgagctatcgcaatttcttgccctttagtatcagctattttgcttttcgcaaactctatttctttttgtcttgctttatctaattcatttgttaatttcgtatactctgaacctagctcttttactttaccttgaattgtctcaacagaagtatttttgttgaaattatccattgctttacctattttttgaatctcatccacactttttgaagctgcttttccaacctctgcatcaatagcttttaaagctgtaagaaataccgacttatcggccgcagtcatcttatatatttgtccattatattgtgtaagtaagctctgaattttctcatttgccttaataactgcttcttcttgtgccttaaatacttccatttgatcgttaacaattttatcttttgcccttaatactgcggaatcagtttctccagcaaaccaactatctaaatgagcttgtaacttgcctctatctttattaatcgcttggattgcctcgtctgctaacttaccaaattcgtcatgtgctcgttgtacagcctctttagccttatcacctgtcattgttggtatttcatctaatgttttaaaagcctgttcttttaaattcacatacccttcaagagcttttttcgtaccttcacttacaccattattacccatttctgaccgcatagtgtttatgattgcaatcgctacatcttggaccttgtacttaccagatttaattccatcaacgaactcttctactgcaacccaaccttgctctcctaaatcaattgttttacttccatcttcaaatgtctttgcaatgtcatttgcaacttcaatagatttttcacgagttgactggaaaaggttatcataaacaatattagaatttgaaattaatgactctccatatgtttttacttcatcagcacttttctttctcagatcagcttcttttgaagatctatcttgaagtctcttgaatagattctcatttgtactttcaattatttcggaattcttaacatactctccgaatcctcgaccttgaattttaattttctcattttcagccttcgtgatacccgttgttaaatccatctcaacgcctttggattttaacacttcttgagcttgttgaagctgttgtctatacccttctgttataaggacggactgttcagagtattttttattgatttgagcaattgttgccttttggttttcagaatctgtaatatgactctttgcgaattctatttctttttttcttgctttatctaagtcatttgtaagtttcgtatactctgaacctaactcctttactttaccttggattgtatcaacagaagtgttcttattgaaattatccatcgccttaccaatcttttgtatctcatttacactcttagctgctgacttccctacctcggcgtcaattgattgtaaagcggttaaaaacacctttttatctgattctgtcatcttatagatttgcccattatattgcgttaaaagactttgtattttttcattcgctttaataacggcttcctcttgtgctttatacacttccatttgatcattcaaaattttgtcctttgcacgtaggactgctgaatcagattctccggcaaaccaactttctaaatgcgcttggaatttccctttatctttatttattgcttgaatcgcttcatctgctaacttaccaaattcgtcatgtgctcgttgtacagcctctttagccttttcacctgtcattgttggtatttcatctaatgttttaaaagcctgctcttttaaattcacatacccttcaagagcttttttcgtaccttcacttacaccattgtaaatgtcaagataaacatgtacattttcgcttgtttaagcatgtacaaaatcaatcattttctttgctaaaatgatctttaattcgataggattgtcctacaatactgaccaccgtggcatgatgtaagacacgatctagtatggcattggcgagtttagggtcctggaatacttcgtcccaagacttgaagttgatattggtcgttaggatggtactacgcttttcataacgcatatcgattaattgaaagaataattttgcatcctccggatcaataggcaagtacccaatttcatcaataataagtaatttgtattttgtatagtgctttaaacgagattctaggcgattctcaatcttggcacgttttaaattttgaagtaaatcatgacatttaataaaataagtacttgttcgctttttagctgctgctataccaatagacgtggccaaatgggtcttaccaacaccactaggtcctaaaaatactatgttttcttgttgctctaagaaacgtagagaaataaaatctaagatttgttgtttattaatactcggctggaattcgaaatcaaactcatcaacctcctttctatgaggaaatgcgcccattttcaccatagaatgaatcatattttgttctcgtacatcaatctcatagtttgtcagtttaacaagtgtctctacgaaggataattcattattaatgctaaaatcgactacgtcacctaaatgttgtgccatttgttttaattttaaatactctaggtttgttgttaattgttgatagctattcttcatttctatatacctcaccaattactgataaattttgtttcgccaaattgtcaatgttcggatatttaggtagtgacttagccaatgcttttttataatgttcttctttataattgagcttagattggctgattttatgttgtacaattaacttcatgttatgataaacatatatttgattatcatatacttgtaaaccgacggttttaccttgatattcagctggaactgagtattgattcgatttgtaagatatcatgcctgatgtattaacttttacaagtttatgcttaatcatataggaatctcttatcgcgctcttcgggagtggttgtaggagattcttttcctgttttagggcaaacactcatatgtgtagagtaaacatccagcgccttattacattcctgtgataggtttccaaatgttcctccccgaaccggacttacatctctcaatgtatccggctctccatctgtcttctgcattttatatctcgcccttgtgtcttttcatatgacactctttacagagtgcgatagtctttcgatttctcgctatcatttgttgttcaagatatgatttatttgactttgctcgtagattctttaatctcttaatgtgatgcatatgtatcacaacattgctagttccgcatagttcacatgtttccgccttgattctatctgacaatttagtcgtactcattacatgccgagtatttggtaaaatgtctgttccttctagtgataaatttcttgtcattggaaactttctttcaatgaaatgaactttattcattcctttctttgtctcatactgtacagtaaattgtccgtacttttcgtatttctctcgaatttgtttcgtacgtgttctgtattttgacgcaaaagttttcaacattgaataatacatgaaatatgcaaagcggtgcatgtgattgctcacattttcagctagtcgatagtaattgtataaccctcgaatttcgctattatattgcgtgataatctctaaatcttcattgtgttggaaatatcctcttggctgaggtttccaagtgccatcggcacacattttaatggcctgatacttttgaagtttctttatccatgcctcatgtggcattttcaattgaattttaccgttaagaaccctagaagctctcccaagactgttaatgcgtgttgcttcacttttaaacactttaatttcaaatcctagaaatttagcgtgtttcttgaaggcatttgttatcagagtcttttccatagataattctagttttatctcttctttcaaaaatgaagctatctcatttttaataagaattgcatcctctttagaacctattactccaataagaaagtcatccgcatatcttacatatttgagccttctataattttcatccattggattattataaggtgtttgtaacaacttccctttcaaaactttttgttgttcttttagttccgtaattcgtgttacttctccatttagataggcagtatcgattttctcttgaatctttattttgtatgaaagagacattttgtttaatggtagttgcatctttttctacagtcgcaacacgtttatcaaacccattttgattattttccacttttgtaattgtttctttaattccatccacactttttgtaatttcagttgttttctgggtgaactcatccgttgttacctgctcttcaggcggtgctgtccaatcctgcggcttattccctttatacaaggcaacccattccacaatagatttcgtagtactactcggataattatataagcttaactttcgttcatttccacttgtagccgcaacagctttgaaggttacatacgttattccattcgcgtaaacacttgttgcatatccaacattgctagacccaccattctgccaaatcccaaatttctgaccttgcgggacactccctttcattacaaaggtatattcctcacctgtagagaaattttcagtagaattgtattgattgattaaataatcggtcttctcatatttaacatttgattttaataaaagattacgtccaccagatttatcgttattaactttcttttctacgctctgcaacttctcactgattttcccagcttcttctttcatttcagttgttttttgcttaagctcacttgttgtttgctgcacatccgaaatagtcttctttgtaccttctacagtttgttcgactgtatgtaatgtattgctgatatcattatcttttttcgttaacgattcaatagaagttttaaatccattggaatcctgttcaaactgagttactttcttattgatttcaccttgtttattttcgatattagtaattgtacggctgacaccttgtaaaccttcctgcacttcgttgaattgtcctgtagcttgattctgtgcttctttaaccttttgatttaactccgttttcgtagcctcaatatctttattcacctgattcagtgtttctttcttaactgattccacatcaggaacaactgattcccaagctgtacctgtccatatttttaaaataccgggctttccgttactcatatcacgccaaagcgttttattaggtttaagccctgttgttggtgggttcttagcttctataatttcaacagtattgtttttaatattctcttgtaccttttcatgcccatcaacttaagaatttgcactacccccaagtgtcaaaaaacgttattctttctaaaaagctagctagaaaggatgacattttttatgaatctttcaattcaagatgaattacaactattttctgaagagctgtatcgtcatttaaccccttctcttttggaagaactcgctaaagaattaggttttgtaaaaagaaaacgaaagttttcaggaaatgaattagctaccatatgtatctgggtcagtcaacgtacagcgagtgattctctcgttcgactatgcagtcaattacacgccgccacaggcactcttatgagtccagaaggactcaataaacgctttgataaaaaagcggttgaatttttgaaatatattttttctgcattatggaaaagtaaactttgtaaaacatcagccatttcaagtgcagcactcacgtattttcaacgaatccgtattttagatgcgacgattttccaagtaccgaaacatttagcacatgtatatcctgggtcaggtggttgtgcacaaactgcaggtatcaagattcaattagaatatgacttacacagcggacagtttttaaacttccaggtaggtcctggaaaaaataatgataaaacatttggaacagattgcttagataccttacggccgggtgatctgtgtattcgtgatttaggatatttttcattggaagacttagatcaaatggatcaacgtggcgtgtgctatatatcaagacttaagttaaaccataccgtctatacgaaaaatccatttccagaatactttcgaaatgggacaatcaaaaaacagtcacagtatatccaagttgatttagagaacattatgcacacgttaaaaccaggacaaacgtatgaaataaaagagtcgtatattggcaagaatcaaagattatttacaagagtaattatctaccgattaacagaggaacaaatactggaacgtagaaaaaaacaaagctataccgaaagtaaaaaggggattacattttcagaaaagagtaaacgattaacgggtatcaacatatatgttacgaatacgccttgggaagtggttccgatggaacaaatccatgatttttactccctccgctggcagatcggtttacaaggtgtcagtcgtacaatttctaatatcgaaaataaacaaggtgaaattgataaaaaagtaactaagtttgaacaggattctaatgggtttaaaacatctattgaatcgttaacaaaaaaagataatgatatcagcaataaattaaatacggtcgaacaaactgtagaaggtacaaagaagactatttctgaagtggagcaaacaactaatgatctaaagaagaccacaactgaagttaaagaacaagcaggaaagattagtgaaaagttaacaactgtagaaacaaaggttaatagcgataaagccggtggacgtaatctgttattagattcaaatgctaaatacgaaaaaacggattatttaatcaatgtattttcgctaactgaaaattttgttgcaggtgaagaatatacttttgtaattaaagggagtgtacctgcaagtcaaaagtttggtatttggatgaatggtgggtctagtaatgttggatatgcaacaagtgtttatgcgaatggagttacctatgtaacttttaaagctgtagcagtaacgagtggaaatgaaaggaagttgagcctatataactttccaagtaacactacaaaagccattgtagaatgggtagctttatataaaggtaataagccacaggattggacaccagctccagaaaatcaagtaacgaatgatgaattcactaaaaaaacaaccgagattgaaaaaagtgtggatggtgtaacaaatactgtatctaaggtgaagaatagtcaagatggattcgaaaagcgcatgactacagtggagcaaacagcaactggattatcttccacagtgggcaatttaaataatgtagtatcagatcaagggaaaaagcttactgatgcaaatacaaaaattgaacaacaggcaacagcaatcggtgcaaaagttgagcttaaacaagtagagaattatgttgctggatttaagatacctgagttgaagcaaacagtcgataaaaataaacaagatttgctgggcgaactagctaataaacttgcaacggaacaatttaatcagaaaatgactatggtcgacaaccgtttcactataaatgaagagggtatcaatgccgcagcaaaaaagaagggtgtttttgcccatcccctcgaaaagggggaataagaaaaaataggatgtttttgtagatggagcgccagagttactgtcgtggactgaaaaatatcattcaatacaattgtgcagtacatttttttaaaaatttgtagtaaatattttggtaacagtgatctgtgtgacaatagaaccgaatcatgaaataaagcgttagcggagattaacgagcaataataagaggcgtttactatcttttcaaataaatgtttttgtacttatggtatactatatgtactttcgtttttacgaaatccctagaaagtatgtagaaaaggttctgacttttttgttagaaccttttcttattttttcgtaacaaatgcttcttttaaatttctgatccaaacagctttatgtaaatcggtatgagaaatccaattccctgattcatgagaaccgacaaattccttataaatgggatgccaaataataagatatgtttcattttcatattgtatctcatcaaattgccgcagcgattttcctaatatatcggattggccgataggtatggcccctttttctaaaatttctttaaactgtttcaaaggcatcacactccttagcataggtatatgtatatattttttaaagatgtattttttcctcttttattatagtaaatgaagagtggatattttaaaaatacatgtagaaaatgccctctatacataaggggtgaatgtcagctttgttatattactatgtatataatgaaagatttattgataggttgataggttattagataagtaaattagttataattaatatatagttttaattatataaaaaaccataataaagaaaggagttcaatcttcattagagtgaactccttcctttactatattttatattaagacatagaagaacctttaaatctttgttaggggtaaagatttaaagaaaagtttagcttaatgtcattttacatcattgcgtttctaataaaattgataattaatattctcattattaagattatttaggtgtataatacaaaaggattttgtacatgcttaaacaagcgaaaatgtacatgtttatcttgacatttacatcaaattaacaacttctcctacccgtaatcctgctaaaaattgaaaacatactcctaacgctatatcactggcttctgcttcttcaataaactcataaacaagtctataacgattaggaccaaaatcttttaatttttgtttctcatttctctgatttctatttggtcgctcaatgtcaaaaaacgacttactaaataaagacaaaggctgtcctattcttaaataatcttttttgtaattcacttgaaaatcttcgtctattaattcgttttcctttaaatatatatataattttgtaagaacattttcacaataattagagtgattaaaactaacaccttcgtatgtcaaatgtgtaataaaatctccaccatgtattaactttaatccttctaaccctttattttgcaatgctttatatcctgcaacctcatcttcaatgttactatagataaaattaagaaatttgcatatgaccctagcagctttaagttgagtgtgataacttactcctctattcctataagtttttctaataaaatctgtaatagggtgtggaataattaaatctttcacagtattttttaggcatatcagaactacttcttcacattgaatctccttccccaccctcttttgtataatcacgcctcttggtatccaatggaatttctgatctaatgttctcaaactattctccctccttaacatccatcattttttattttttaaaatattcttacttttgaccaccttaattctatactcaaaataaaaaagaagctacacacttttaaaaaagtgtgtagcttcttttttattttgaattgtgttgttattgatgttagtaccccatgcccatcaacttaagaatttgcactacccccaagtgtcaaaaaacgttattcgcacacatttcttctaatccgcgtgttgcctcccagcctaattcacgctttgctttcgatgcatcagcaaaacatactgccacatcacctgggcgacgctctgtaattttataaggaactttcttgcccgaaactttttcaaacgcttcaaccatctctagtacactatagcccatgcctgtgcccaggttataagcatctactcctgttgtactcagtactttctcaagcgcctttacatgaccatttgctaagtccacaacatggatgtaatcacggactcctgttccatctttcgttggatagtcatttccgaatacgcttaattcttttaacttacctactgctacttgcgttacatatggcattaagttatttgggattccatttggatcttctccgatacgcccactttcgtgtgcaccaaatggattgaaatagcgaagtaatgcgatactccattctgcatctgcaaatgctacatcacgcataatttgctcaatcattaatttcgtttgaccatatggatttgttgcacttaatggaaactcctccgtaatcggtgacgtttccgggataccatatacagttgcagatgaactaaagattatcttctttacattatgtttctgcattacttcacatagcactaacgtgcttgtaatgttgttatgataatatgttaatggaatcgctactgactcccctacagctttaaatcctgcaaagtgaataactgcttcaattgaattttcttcaaaaattgcgtcaagcgcttcgcgatttaaaacatcttctttataaaacttaaattgttttcctgttatttcttttactcgatttatagattctaccgagctattcgaaagattatccactactataacttcgtaaccgctatttagtaattctacacatgtatgactaccaatatatcctgctccacctgttacaagtacatttcaattaatggaaaaccgtagagtttctatccttaagttgatgggcatggggtataaacaccatcatatcgataacgaaatggatatctggcattatttaaggctaaaccaaaaatatcgtgaacaagatcattcaaatagtggaaatcagaattcaaatgaaattgaagttccagcagaaaacattatctaataagggggaagatgatggcgaatgaaatgaataatttagtcgttaggctgtcccttgataatgtgaattttcgtcaaggtatagcaaactcaggacgtgcggttagaacattacagaatgagctgaaatctgtaagtacaggaatgggtggcttcgcaaatgctagtcaacaaacgcaagcgaaaatgaatacactcagcaggcttattgaagcacaaaaagaaaaagtcagagctttgcgacaagcctacgatcaaaataaggctaaattaggtgaaaatgatgcagcaacccagcgatatgcttcgcaagtgaataaagcagttgcggatttaaatagatttgaaaatgaattaaagcaagtaaaccgtcaagctgaacaaaaagggatggacaagttaaataactctttgaaatccttacaggctgaatttcagtctattacaacaggtatgggcggtttttctaatgcaacagagcaaacacgggcaaaaattgatgttctcactcgcatggtggataagcagaaagaaaagattagggaacttcaacaagcctataatcgcgcaaaaactgaagaaggcgaagcgagtcaatcggcacaacattatgctgaacaaattcatcgtgctacagctgaacttaatagatttgaaactgggttacagcagtcaaatcgtgaattagagcagcaaggtaatcgtttattgaattttggtaatcgtatggagacattaggtaatcccttatatagtcgatgttggtgacaaagttgtgattgatacagaaagcagtcatgtcagtattgaagggaaaaacgctattaacataaaagatatttttagtaattttcctgttatcaataaagggacgaataaacttgaaatcataccttccgatataggaacagcaaaggttacatatagggagcgatttagatgagaacaccaagtggaatattacatgttgttgattcacaaacagatcaaattatcggagcgattcaatcaaaggattattggaatgacaataggcattgggagattaaaaataatgttgataagctagattttacggtttttgatggtacaaaagaagccgcagcgcttacgcaacaaaatttggtcttaaaagaagtaaggggtgggcgaattgttccatacacaattactgaaacagaaaaagattctaataatagatcccttacaacttacgcgtctggtgaatggattttacttggtaaagcaaattatattgatccacaaaaatttgaagcaaaaacagtaggggagtatgtagatatagctcttaagggaacgaaatggaaaaaaggaaatatttcttatgaaagtttccgttctatgaccgttgatgaatttattgatccattaagttttttgaaaaagattgcttctctatttgaactagaaattcaatatcgaactgaagttgtagggaatcatatcgaacggtatgttgatatgatgaaaaaacgcgggcaggatacagggaaaacaattgaattagggaaagatttaattggaattaagcgaattgagaactcgcaaaatatctgtacagctttaattggttttgtgaaaggtgaaggcgataacattattacgatagaaaaaattaataatggtcttccttatatgctgcaagggctttatcttcaatcttttctccacgtaaacccatttgctctaattcagatatcaggcgatcaaaacctaaaaaatcaacaccatcagccattcattccaccacgcttccacatgattgataaagtgtgtttttcagttggaataactgaaacaatgtcataaattacgttcttatatttaatcttcatatcagcattcacatcagcacgatatcggatttctgtttcaccttgaatttcgctattagctgccgctgcttcaaaatattttcttccctttaaaaaaataaaagagccccatacagtaaaggaatccttgtaaccttctattggatcaccgtccgggctctttgcttcctcgtctttcacttgaaaggtaagacgtttatctaatttacctggattcacttgaatcaccaccacaatattgcaactgaactaatatcgactgcaaactaaatgccaattgttcagcttttccaaccgcttcacggttttcatgccaatgagcaattaaaatacgagctgctaatttagcaagctcgctttttaaatccacatttttacttgtagcatttttaatatatatttcagctgcttctacgaaagatgtaatgagatcgtcctcctcatccccatccacacgaagatacttttttgcttcttctaatgttagtaccaagaagaacccctcctacatcattaagctttggccgtaactgtaatttgaccatatacaaccgcttctgtatcccataacgtaacgtcttcacgttcaattgctcggaattctgttgtattacctctccaagcacttccaccctcttttgtcatatcaagcgataactgctgtctatcccataacacaactgcttctttcaggtccccaatgtattgaagttgttcctccctaatttataagacattccccagtgtcttaaagcagcttccatccctaattaaattgacataaattgtccccttccttgaccatcttataaatgatggtcttattttttgtctttctatcttttatttaaaacttccactctctttcactctatgttcacacagaggtcacatctaccttttatagtatatgtatcgaagttgttcctccctaatttataagacattccccagtgtctttgaacagcttccatccctaattaaattgacataaattgtccccttccttgaccatcttataaatgatggtcttattttttgtctttctatcttttatttaaaacttccactctctttcactctatgttcacacagaggtcacatctaccttttatagtatatgtatcgaagttgttcctccctaatttataagacattccccagtgtctttgaacagcttccatccctaattaaattgacataaattgtccccttccttgaccatcttataaatgatggtcttattttttgtctttctatcttttatttaaaacttccactctctttcactctatgttcacacagaggtcacatctaccttttatagtatatgtatcgaagttgttcctccctaatttataagacattccccagtgtctttgaacagcttccatccctaattaaattgacataaattgtccccttccttgaccatcttataaatgatggtcttatttttttgtctttctatcttttatttaaaactccctctctctttcaccctatgttcacatgagagtcacacctaccttttatagtatatgtattgaagttgttcctccctaatttataagacattccccagtgtcttaaagcaggctgactcttacacagcctaactatttgttcgaattttatgggtgaaactcccattctaggataatagctcattaatcctagccatgatacccctacatgcgctaacttacacacgagttagggtctgaagttaggtaaggtcgtaacctgatggcacaactcactaatgcctatatggtgcggtggtctttaaaaacattccaatggtgacgaaaggaatccatgttttgaagcgtcgtgagggaatcccttcttaacgtgagcaatcggaaggaataacgggaacaaggagaggctcgaagttctaatccttgcacataatcggtttcgtaattaccgattatgctgaaccagtatgttagagctactcaagactggtgagtaccgtcggcgtaaagtgggcacctaaaggaatgtaaaaataagggatagaacaaatggaacttgggaagcttgcattgccatagggagtgtgatcctgcttgaaacaatgcaagtggcagcggtctcgtagtagtgaggaagcggagtaatgtccgtggagcgaaggggaccagtcgattcagaataacaatggatatttcaaatgtctatatgaacctcttctagagtgggaattaaacagcacatcgttacaatcgcttgaataatggggagacgtaatgaggattaaaggacatttgatagataatgaagcacagctccaagataagttagacctaatatacaaaaaggccaaagaagataactcttcttttcatggcatgatagaactaatgaaaaacaagcagactattaaaacggcaattcacaacattaaaagcaatcgtgggagtaaaacggtcggaattgacaagaaagacgtgaactactaccttaacacgtaaagacatccgaaatttatctattatttttcaggagatgggaatgtcaaatgcacgtgtgaatggattaatgagcgcattacgttcagctcttgaattttgcgctgatgatgatgactatgagtatgaattcaatgtaggttcaagggtacgtggtttacctaagaatccaattagagaaattacatttattaatgatgaccaaattaattggttaattgatgaattactggaaaaagagaaatatatgttggcaacgtatttaactctttcttattacagtgcagcgagaaaaaatgaagtttaccaggttcagaaggaaggactgacagaacaatattatacaaatgtggtcagaggaaagcgcggtaagaagtttagattatattacaatccacgagtacagaaatgtattcgtttatatatagatcaacgaggtaaggatgccattccggatttgtttgtacgagtttataagaatggtgagagaagacaattaaacaaaagtgtatttaattattggtgcaagatatttgctaagatgctgaacgaaaaggaagggaaagagtttaaagtcaatccccactgtttccggcatagcagattagataatttaaaggtgcaaggtgtaccactcgaaaaattaaaatcgcttgctaatcattctgatatttctacaacggaatcttatctgaaggatagaagtgaagaagatattgcagagatatttgggatggatccaagttgctttgcagcttaatcaggagcatatgtatgcttctttttttattgataaaaagaccaactatgagaagtcaagaggaattttataaataggaaattaaaaaaaaaattctaatttaaatcctgattctgtaacaatatccaccatgtatgtatctatgagtggctcgtaaataaaatcatgatctattgtgatttgttcagtcatttgattcaccttctatcggtgaaagcgtaataatcatttgttgatctaacacattccctattacagcattcatccatagattaggattcatttttctcattaaaaattcgatgactgtgattaactcttcagtagataaggaaacaaattctcctaaaggttcttgattaaacttaccaccacgtttttcaatcgttagagctactccgttgtcaatcacgtatctttttgcagtaactaaatcgaattgacggactttctcgcggccgaatccttttattagttcctttagaacatcatgaatgacacgaaaatctaacacttttactttctgttcaagctgctctctacactgcttgcataaagtcctttccaaaccagaaatatatattttactcatatcagactcaggaaaaggattttcgcattcataacattcttctccaattacatcttcaaatggatttagcatgtaaatcgctcctatgatttatatttgtttagcacttcttgcaatctctcacgctcttcatcaatagattgcgagttttgcttttcgatttcttttttagttggctcaacatcttcacgtaaccattctggaacaatttcttttctatttgaacgaccaggtcccgaaccattcaatcgcttgttcttactcatttcaaagcgtctatctaatgcagcaacatcatctaatgtttttaagccgagaaggtggaacaaattcagtgcaagtcttactagatattgcagaagatttcgaaaaacaaaagctgtatttggcaagattacgttctagtttgtcacaagcacaacgtgcttttgtacagaactgcttaatcgtcatcgctatgccgatagttattatgttgatgtcaaaagaagcatatggatttttagcaggttctatgatggggaaaatcgcgttagcggtaaatatgttcattgtctttttcttagcaacccgtgtagaaaagattgcaaattataacccaacagaaagaggggaataaggtggctacgattttagctgtagtggtattcgttgtcatgtactgggtattctctacctttctacaaagtaaaaaagacagcggtagcttacttacgaactatgtagaaaatgcaaaacgaattgaaaagaagaatttaaatcagatgatgctcgcgcccttccagtcgttatcacataagtacctgacagaagaaaagaaagagcagattcagaaaaaattagaagaagctggcctggatacgaaaccagaagaatatttaaagatgaaggtagcatatcccatcattttcacctctgttttcttgatatgtacggtgttccatgattactacttatttaaagtgggagttttgatttcaccactgctttatttctatcctgattatctattaaagagaagaatcaagcaggcgatagaagctaggaagttcgaattaccagagtatctaattgaacgatgcagtaatcgatttcctcttatgcgctagtgatattggatacacaaaaatgacgaatgtttattttaaagaaaatccatatgcaaaaacgagagagattatagaacttgcacaagcagataaaaaagaagcatctaaaagattacaaacgtacatggagaaagaatggtttaaaggccattatgattatgaatggaaaaatgcgcataaagaacctggatatgtaggatgttggagttttgaaacagcggcgcttgcgaaaattttggaacttgatgatacatgtttaaaagataataatcactatccttatgatttggcacattacaaaaatgaaatgaaattcaagcatatagacctaagtgaatatcactatgaagatgagacagaagaaatcgaggatatagtagaaggaattgaacataatcctgcattggaaaatattattccgccaaaatggcattcattggtcaatgaattaatacatgactatgagaatatggatgatagtagtttttatgaaaaatacaaaaaaacgataggaataggtcaagtgtggttcttaccacaagagtatgaagaagaaaatgaacaaaaaaatctattaggaagtttaattgtgtttgccctgacggtaagagattatatattacaactggactataaagaagatttagaagactacattgataatcttaaaaatttctggaatgtttcagaaacaaagttaccctccagataaaacagtattgagtccatcatatcagatggactctttttttactgtctacctataggggataataccagatgcgtactctttttttgggtgattatattccatcttgaacagatttctttacaattacccatgtgtctttctttttaaccgttatagctacattagttccattagattccttataaaagatatatccattgtttgagtttacatatgtaactggttcacctatgcaatctcgcgagcaggatttgttgactagttcaattaaggatagttcacttggatcggttttactggcttctataacagcatcaaggcttgtttttcgataaccttgcaagtttatatgaaaaagctgctctatttctcctgtaatgctagtgttcattacttctactgaattctttttttcttgaagaaagccgttttcataaagtaattttgtatagccaatccatgctattaacactagcatgaaaaacatacccgtcattttaagtattcgaagtcgtttgcttataattgtttctgagtatttcattcactctaatcctccaatgtttttaatttaaaatatgcttggatacatacttttagaagaggatgaaagttaatgagtttttaataaaaaagaaaacatccagggtttaaaatgtaccctatagaatagacacttgaaaaaagtctattctatagggtatttgctgaagagtttccgcgtattacgttttttgaactagacaatagaccagatggatttgcggataatgatgaaagtgaaagtgaaatcacattccaaatcgatatttggtcaaaagggagtacaacagcaatccatcaaaaagtaaatgaaatcatgaaagatattggtttctcacgttatgcagtagctgatttgtatgaaaatgatacacaaatttttcattacgcgatgcgattcgcgaaaggagtggagttataaatggctggagaaattattacaattagttcgactgtcggtgtagatagtcttgtttatgcaaaactattaaaagatgatgcatcaggtgtttcatatgcagatgtaaagaagttagaaggggcagtgaaggttaaaacttctaaaaaagtagcttcagaaattatgtggagtgataataaaaaatcagagattgctgaatctgacggagaagtggaagttgaaattgaagttcgtggactttccttatcagcgaaagcagatattgaagggtatccagaagttacagacggcgtattagatgaaaaacgagagggagaaaagccatatttagcaatcggatggcgtttcttaaagggcaatggaaaatatcgatatgtttggttattaaaagggaagctttcacaagaggaagaagaaggcgaaacgaagaaggataagcctaacttccaaacaacataaccaactttgaccaaggtgaagcttcttttgccttctttccacattctgatcgtgttaacactggagttgttatggcttcttctacagtccacttcaaacgtttaactctgtcacgtgccgtactataactaataccatttaattcagcttgttccgcttgtccatcagttaacactttatttttacattttgaattgacttgttccgccaattttaatgcttgatacttatctataggtggcttactgattgcatcaatcaatctccaacctttttttattcttgctgtataagttgaatgagagataccatttttcaaagctatttctttaatgtttttccatctatttgcgttatatcttgatggttttgtcattgcaatttctttgtcccatcccaaatttctaatcctacgtgtcagtaattcattactaattccattctttgcagccgcctcatattcttctggagttatataataatcatatggattccgcatgagtatcttctcctattcaattgttagttaagttcttgaatttcttttaacgatctattcgaaacttcaatactacgaatcttaaaactataattcttacgatatttttcacgaatttttaacgccgcttcttctttcgtttcagcttcacaaaattctaatttaaatcctgattctgtaacaatatccaccatgtatgtatctatggaagttaggcttatccttcttcgtttcgccttcttcttcctcttgtgaaagctttcctttaagtagccaaacataacgatacttattatttgcctttaaaaaacggtatccaattgctagatagggcttttcaccctcacgtttttcgtctaatacgccatctttcacttctggatatccttcaatgtctgctttagttgaaagcgaaatactacgaagttcgatttcaacctcaatttcaccgtcagactctgcaatttctgatttcttattatcgctccacataatctccgaagctacctttttagaagttttaatttttacagcgccttccatttctttcactgcactatagtcaacacctgttgcatcatcttttaataactttgcgtaaacaaggctatctacaccgacggttgaactaattttaattacttctccagccatctataactccactccttttgcgaatcgcatcgcgtaatgaaaaatttgtgtatcctcttcatataaatcagcaatcgcatagcgtgaaaaaccaatacttttcataattccattcactttttgatggattgctgttgtactaccttttgaccaaatatcgatttgaaatgtgatttcactttcactttctttattatccgaaaatccatctggtctattgtctagttcaaaaaacgtaatacgcggaaactcttcattgatactttcgatggtaattacattgtcgccttcacctttcacaaatccaactagtgctgtacaaatatctcttgaatgttcaatacgtgtaacgcctatcaaatctttcccgagctctatttctttgcctgtgtctcgaccacgtctttgaatcatatcaacataccatccaatgatttgtgatccttgaacctcaacacggtactgaatttctaatttgaataaagaagctattttctttaaaaatgttagtggatcaataaattcatcaatggtcatcgtatggaatcctgcataatccgttttcccacgtttccatttcatgcctactagggccatatcaatatatttgtttaccgtttccccttctattctttgcggttttataatacctgacttagcaatttgaacccaagctcctgaagcatatgtggtaatggatcggttgtctgaattcttttctgtttctctaataacatatggtacaattcttccgtcacgaacttcttttaaaacaagattttgttgttgtagcgtagccgaatgagttgttccatcaaaaacagtaaaatccaacatatcaacattgtttttgatttcccactgccttttatcatcccaatagtcctgcggctgaatagctgcaacgatttgatctgttttaaaatccacaacatgcaaaatgccgcttggataactatctagcaatgatgcaaattcaagtttctgaccctgtaaattcacaagcaaaagttttgcccccatcatcagttcaaaatgaagattcatcgtacaaagaagtgtttatgaaagctatccgtggtcaaaatttaagtcatgaagaagcaagcgttatgcaggaatacaaagcagcattatctgagaatacaggtaaagacggaggttatattgttccagaagatattacgacaacgattaatcaattaaaacaaacggttgataacttagagcaatatgtaaatgtgcaacctgtttcaacgaataagggagctcgcacattagaaaaacgtgcagcatctacacctttcgctccattatctgagtatggaaacccaaatgcaatgcaagaaattgcttcaccacaatttgatcgtttaccgtatgttattgaggattatgcaggatttctacctgtaccaaatgatttattaaacgatacggatcaagcgctagaagcttatttacgtcagtggattgcgaagaaatctattgcaactcgtaattatttaattttacaagaaatcaataaattaacaaaagttgatttaaaggattataaaggcattaaaacagcattaaatgtcacattagacccagctttctcggctgtagcaaacattattacaaaccaagatgggaataacgttttttgacacttgggggtagtgcaaattcttaagttgatgggcatgtgacggtaccccatgaataggatattcataataatagttccaaccagatagatatctcatgataaaatagaaataaaaggaaagatggtgaagatttgaaaaaaccattaaaaacttcaacaattatagtaaccattatcaccattatcgcttgcggaataggatttgatttttacaatcactctttatctccagatacaatttatagtacaggtattataattattatttttcttctttttagtacaagtattaccgacaagtctaaaaatacttctaagccaacaaagaaaaaggtcccagcaatattttggtctaatatcctcataatgatcattttattcgttgtaattagttttgtaactacaggtcatatatccattcaaaatctaattttatttatgtgcttaattatatatggtggttttgttattattagcattctatcaaagaaaggcaagatatagatttattaacttccgagaacgagaattatgtaaataagctgtccatatgggcagcttattatttttttgcttagcgtggtttttttccaaaatgctggcggtaccccatccctatcaagctaatagttttaattaccccataacgaaatttttagttgacatggcatcccacatgctgtttaccccattcgcaccttctttgaaaagaatcgttgcaccacgtacagcatccgatccgaataacgtttccaaagccatacttcgttgctggtctgttaaatctttcattgattcatgaagtgttcctgaaatattttctaagctttgaatatgtccttgttgatcatagaattttgatgataggaacgctgaacttgtagctaattcacggaatgttgtatcacacttgtcattccactttttcgcaccttctattttcattacatagccttctaaagcttgctcaatatcaccgacgctccttgaagctggttgtataccgtttttaacaagaaaatcatagccagcttgtgcattataagtaattaaccctaaatccctcatttggttatatgcttcttttgttgttggatttaatcgcataagcattgtttttaaagaagtacctgcatcagaaccttttaaaccattttgtgcaaaaaccgctaacgtagtagctgtatccttaaatgtcattccagctcctgctgctactgctgatgaagctgaaagaccgtattttaactcccgtacatctgttgctgaagcattagccgctccagataaaatgtttgctgcatccgcaacagaaagatgatctgctttaaatgattgtgaaaagaaacaaatagaggcgattcaaaagaatgatccattgttactttgtacttggattaaagaagcaagattggctcgacgggagcttatagcgctataccgtgagaaagaaaaatatgatacccaacttgaacgggatcgtaaaagcattctagggattgtggaacatttgaaaagtagaggtatcaatgcttcagttgtgaagagggcgcatcataatacgctttctgaagagtgctgttaaaagtaaaaaagccctataaaataggacttcttctgtacataggtcatactacttgtttcgtgcactgacattcatcataaacagtatatcagatatattctgaattatcttcatgtaaatgctttagaatgacgaaaagacctaaaattaggtcttctcatcggcaatatcagtctagaacagtatacctaacaggagtgagttaagtaaccggaatgctcttatagtatagcaaactattacatttaaaaacaagaagggatggtaaaaggaaatgacagcagaagaattatttgaagaaaagaaatatttagtgattgcagcagttaagcaacaatttggaagtatcgcaagagctggacagattgcagaaataaacaatatggatttggatgatttaatacaagttggccatccttgtgaatttacagggtcagaaacttgaatttgcatcattgctagatagttatccaattcatttttcgcgtttttcgcttcctcaattttcacctttgcatcttcatatttaccgctgttattaaacccttccgctttcgctttcaaatcagcaactttctgtcttaattcttgttcacgtttatccattccgtatttcctcctttttttggcacaaaaaatagacctatagctctaacaggtctagtgcattttgtatttttaattgttcgttattatccttctttgaaatagaaggagcctttgctacaatcttatttggtgttttttgatatttatcaaagtaatcactgctacaagctgcgacttcttttgcttccacaacttcaatattgaagtatttttcagcttcttcaccacttaaccaagtctcagcatctactaattgctgaatttcttcaatttcgataccttcttttaagttctctttgtatacattcatgattcctgtctcgatgttatcaaggtcctctgctgcttttcgtaaatcaattgcatttccagctgcatatgtccagggcttatgaatcattaagaaagcgttagaagggacaacaacacgatcaccagccaaggcgattacggaagcgatagaaggcaacactctcacttcacgtctaaacgcttatagagaaacgtgtcgcgcctgaagcctgcatcgggtcatttcctgctccacctgattcctgcatcatttgggcagccaaaataccaacatattgagcaacaccatgtttttctgccatttctttaatctttggaagatatcctgtaacttttgcattaagattgacaggctccccgccaggactcacattacctacacacataccaccaacaaaattactagaaggtgctagatgtccatacataccttctaacatcccggcttctaatatctcacgcgcacgttctttttgacttttactaaactttgcgagttccatagctttctctagtccatgagaagatgttgtcacttttttgcttccacttgcattaatctcatctatttttttcttaaaatctgtatctcctactatcttttttacatctggtccggagtaactttcagattttgttttttgcatctcttttttctttttttcacaaggaccattcggtcccgcctcacatacctctttttctgtatattcttcatattggatatccaataaatatgatatagcatcatgcggatctttaccagttaaatcattatcatatcgtgacgcagtcaccccataaagaggctcccactgcttgtacgtacacggtttcaggttctttttcactcccctcgccggggttcttttcgcctttccctcacggtactggttcactatcggtcagtcaggagtatttagccttggaggatggtccccccatattcagacaggataccacgtgtcccgccctactcttcgagttcacagcatgtgcattttcgtgtacgggactatcaccctgtaccgtcggactttccagaccgttccactaacacacaagctgattcagactccgggctgctccccgttcgctcgccgctactgggggaatctcggttgatttcttttcctcggggtacttagatgtttcagttcccccggttcgcctcgttaacctatgtattcagttaacgatagtgtgtcggaacacactgggtttccccattcggacatcgccgggtcaaaggttcatatcacctcgccggcgcttttcgcagattagcacgtccttcatcgcctctgactgccagggcatccaccgtgtacgcttagtcacttaaccatacaacccaaaaatgtttttgtgtcgtacagtgtgctttgctatacactctctcgcttgagttcgagaggcgataatctccactccttcttgtttatacgatttatttgtaaaccaatctaacgatttgcttccaattaattcatttaaatcacactttccaataccaggtacattacctgtttcagtgtattgccatatatcgcatggataatccggtttcttccctccataacgtggaatccacacaaagtcagctttcacattcgccataccaaatggaaaatacatatgatggccaacatataaaccaactttttgagcacctaatcggcgtagttcatcgataaaagcttgtgttcctgctctcatatcatccattgtttttacttctacatcagcaacccagaccgttgcgctcttgtctccgcggttccaaaagtctcgagcttctatacgtgcatcattttcagaaacaaaacgacaaaacgcatagttaccaaaaggaattttatgctgcttcatagcttgtacatatcctttatatagaggatctacataatttgaaccatcttgtacacgagcgatgataaaatcaatgtattgttttgccacgggccaattaatatctccattccattttgaaatatctacagtgtaacccattatttatcctctccttcgctatgacgaactgaaaacgaaaaaactttgctcgcatatttaattcatagatatttcatatcgttaaaaagttgcaccgtttcaaacgagttgtgtgataaaaagatgtttagattatgtttgaaattgttgtttctgtgaattttttatttcgcgatttctgtatatttttaatcctttttactcttaaaatctttttgcttttgtgcgcaaatgaaaaaatcaaaaagtcacgcgtaacttttattaaatatataaatatattattaaaatacctaacccttttatgatgaaaaaatataaatagttaaagaaaaaagactgatgaaaatatcagtcttttttctttagttttatttataaagagtatctctttatggtgttttctactttttctctccagttctctatatcgtcaattgatattccgatctttattaattcgtttggaatgaaactgttatctaaaatccataaagtgagcctttctaatgtgattctttcgtttccaatcgaataaatacgttcactttgtttgcaggtatatggttttttaccaacatatttttctacataaaagtatctttttccgtttgctttgtaatttgttaggtattcgtacagctatcaatggaattattcgtatcataaataaatttatagatggttttaatacaccagcagaattattaaacaatataccaggagttagcgcgccgactattccacatgtaccaatgctcgctaaaggcgggaagcctgtaggagatggctcatttattactggagaaaaaggacccgaactgtttactaaaagagggaattctatcacagttacgccgttatcttcaaaagaaagatcactcggtatcactggaactatgaatcaactaatgagtgatatgagccggatgatggctagttcaatgagtcaattatcagggttaaagagtgttatgagtggtgtgtatggaaatatgtcaaatagtagacaagctatggcagctggtgttgcgaatcaagtgattaattattcttcaggatcatctggcggtggagtcattccaacgcttggtggcgatttagttgtggaggttcctgttgttttagagggacgagatgtagcgcgtggtacgtatcgctatacaaccgaatatcaagaaagagaaacacagagggattcagacttttaagtttgagtctcttttaatttgaaaagtaaattatctatcttagaaggaatactggaattattgggagggccgctattagttataggcgcaatggtgtgctttgatgtattcgaaccctggccgctaaaaatcattgggatgtttgcgtggattgttttgattttctttgtaccttcaataataagccacaggcgttaactcggtctattaatcaatgtctacgtcatttcttcacccacggaatccaacataatgtaccccactctttcgcaggtcattgaggttgtacgtcagtcctcgggacatcatcgcaagcacactgatgaggcgttacgcttgtcactgaagaagatggctatgagaaaactttttccctcgctgaaaacgagtttctttttagcaccgagggcatagattactttggtatctgccgcttgattcgcaggatacgtggcatacctgaacctgtgatacgcgatttaaccgttggcgaactccatgctgtacttgttaaggctgtcagagaacaaagacatgatgtttgagttatttttagcgtagtgcgggcatgtcctcacatgcccgtgcagactggcttgaagtttaaacagccttccccctcccgtgtaaatttaattccagaaatgattcaaatgatggatacgcttggatacacttctaaaattgtgtctcgtggagatcgtcaagggcttgtatattttgaaacggattatcgtcaaggaaatgaattagataaagtaactgcgtggttagatgcaaaaggccttaagtatttttatacaaaagaatagttttacgaacagaaataagagccgtcctgtcgggcggctcttatttaatttatattcactaattcatcaaacttaaattctgtgttgagaccaaatgcatccgtacaatatacgatttttaacattggttcgatgtgtagcacatttatgtacatgtcctgtatcatgccatcgcgatagtaagaaattgatatttcttcatgagtttgcatggatcgaataagactatgttgaatttgctctttcatatcttcagaaactattggtttcggtactttatttaagtcattaagtatttctctaattcctgcaaactgttccggcatactggcaaatggttgccacttcaccattttatcaagactttttttcgattattgtagcgatattaatgcctctaatggtggaggatgacgggatcgaaccgccgaccccctgcttgtaaggcaggtgctctcccagctgagctaatcctccaaaagtggtgacccgtacgggattcgaacccgtgttaccgccgtgaaagggcggtgtcttaaccacttgaccaacgggccaaatactataaatcctatggcggagagcaagggattcgaacccttgatacgcttgtgacgtatacacgatttccaatcgtgctccttcggccaactcggacagctctccaatggctccgcaggtaggaatcgaacctacgaccgatcggttaacagccgatagctctaccgctgagctactgcggaataatattgcctggcaacgtcctactctcacagggacaaggtcccaactaccatcggcgctagagagcttaacttccgtgttcggtatgggaacgggtgtgacctctctgccatcattaccagacttttatcattataaacatttctttcgaaatgtcaagaagaaattttaatgcatattccttcaaaactagataacattgctacatattatatggttaagtcctcgattgaaatcgaagcacagaaaccaagtacatttttagatgtgtggtttggtgagtatccatataatcgagattactttagaattggttatcctttgaaaacagagcaattacccgttgaaagaaatcaaagacttatatgggacgaaatggctaccactgtaggatggagtaaagtcagttcaatggaagatggcaatccaattggtgaaatgaagtcagataaataccaattttattgttctgattttggtactagtgcggggaaagggtggcacggtgcagctgttaaaaagaatatacctgggggtccagtacaagattttattatgcaagcccatgttacatgtaagagtaaaaaaattaatgaaatgggccgagttgagatagcgatattggatgaaaatagcaaggttctttccaaaattgccatgtctgatgtgttttggcaagctgaacaaaactttgggacgatggtaattggatatgataataagccagggaaaacaggtttaatttatgagagtggtgattatccgaatacatggaatcagtattgccgcttgcggctcgtttttgtttaaaaaccaggcaagaattaatgtctgagatgtgttttgcctggaaagtgagcagtcggtaaataattttcactttgcacttgcagcctcagaataactccctataatgcgcctccactgacacggaacaacggcacgcaagccgccgggtcagcagagaaaagcaaaataaacgcttgactctgaagcgggaaagcgtaatatgcacaccccgcgccgcagcgaaaacgaagcggcactgctctttaacaatttatcagacaatctgtgtgggcactcaaagtgacatggattcttaacgtcctcggacgaaaaatgaataccaagtctcaacgagtgaacacgtaattcattacgaagtttaattcattgagcatcaaacttttaaattgaagagtttgatcatggctcagattgaacgctggcggcaggcctaacacatgcaagtcgaacggtaacaggaagcagcttgctgcttcgctgacgagtggcggacgggtgagtaatgtctgggaaactgcctgatccatctggtctattgtctagttcaaaaaacgtaatacgcggaaactcttcagcgtttttggctttacgataatacacacgttttccacctaataaggaaacaagctcctgattattttcaagagcttgcacgatttcagggcgtaaatttatcatacatttagcctcatctcgttctttaagatgtctgtcatagcacgtaccgcatccgctttagaagcgttaaaacctggttctataaatggatgtgctggcattttagaagtaccccactctaaaaactttccatagaaatatggagaacggtccgctttgtctattccaatcttgatcgtcttcacaccattttccattcgtgccttcgtaactcgtatattatcaagcaaatgttggcctgtacgccaaggttcacttttagacggtttcttaggacttgaactcctcggttcacttctttctgcaatggcttttcgaatttgctcaccaccagctgcaagggctttatcttcaatcttttctccacgtaaacccatttgctctaattttgtatgcgaattgaaggataacaaagttattacacaagtgaaacgagtgattaaagatacatttaacaataaagtggaattatggggatcgtggggatgcgaaggaacaatacatggtgattggggctacaatcatgcgaataaatgtagatatgccacagttgaggaaatcaacgcagaaagtgtaagacgtgtatttgctcaaaaaggacgtaagccgaacgagtatcgttctggtgatattgtaactgatgatgtgtatgcatatcgtgtgttacatgtaatagaagatagagcaactgtagaactcatgaattcaaatcaaatgtatgaagttgcaacagctaatttagaaatccttttctttgatgaggatatggctggataaagcaattgcataaatagtttgctcaatctcaaataaaggataaggggatacatttaaaatgcgatatgcaagaggcactcaatatggtttatatgcatgtaagggtaacaataaagattacaaatggtttaaaaaagctaggaaaggtatgggaactaatttcatttatataccagcccttataatttataagactgattatatcagaggtgaaataaaaaggaaaaccttttggctacgccaaaccgaaattcatctcccacctatcgttgggctacgcccttcacacgcttgaggaaggagaattctttcgggaagttcgttaaaataaaggaaaatgctatttaacagtaaaaatgtagtaaaaactcttctataggcaagaagagtttttttagtctatagtgttctgtagggattagtatttttatcattaaaaacaataaataaatatatataaatataatgtatatgtgttattatgattacgttggaaaataaagtatattttgattcgtaaaaataattaggagaagaaggggaaatagcatgaaaatgaaaaaaatgattttaacaggtgtagtacttgcagcaacaactttaacatctttatcaaatgtacaggcagatacaacatttaaagatgttccagcaaatcactggtctacaaaagcaatttatgatttaacaaatcgtaccccttgtcgttactcatgtcagcattcgcacttctgatacctccagcatgcctcacagcacaccttcaacggcttacagaacgctcccctacccaacaacgcataagcgtcgctgccgcagcttcggtgcatggtttagccccgttacatcttccgcgcaggccgactcgaccagtgagctattacgctttctttaaatgatggctgcttctaagccaacatcctggctgtctgtgccttcccacatcgtttcccacttaaccatgactttgggaccttagctggcggtctgggttgtttccctcttcacgacggacgttagcacccgccgtgtgtctcccgtgataacattcttcggtattcgtagtttgcatcgggttggtaagccgggatggccccctagccgaaacagtgctctacccccgaagatgagttcacgaggcgctacctaaatagctttcggggagaaccagctatctcccggtttgattggcctttcacccccagccacaggtcatccgctaatttaatcaatccctttcttttaaggtgaaagcagaacaccatttcttcatatttaagctgattggggtagatggtataaaggctccgatatgggcgagtaaagatggaatgggacaagtgtattttaaatgataaaaattctaagattttcactataaaaaactatgctgaaaagtatagtttttttgctagaaaaatatatttaaaaataaatatataaaaatactttacaagcctatttttatatggtaatattttccatatagaacggcggttataaaaaaacgctaattaattaatttatatgttaaagtatctggattttatgtttaatttaggtacaataaaagaatctatgaaaaaactaatatatttggaggaacaaacaatggcaaacaaatttttaaaaacagcaacagcattaacaattatgggaacatctttattaggagcaggagcatttacagcgaaagctgctgataacacagactcattaaaattcaatgatgttccagcaaatcactggtctagtgattatccgaatacatggaatcagtattttggtcgattgtggatagctagaacgggaaatgtatgggaagcatatatttcaaaattcttgccagggacagagaaggatgattcagagcgctttgcacggtggacggatgaaaaaaacgatcacatggaaaaagcagcacaaatccagattagtattatgcaatggcaagatgtaccaccagtagaagcaatgaccgtttcagatttgaaattttggaaagtcaatttaaatactcaaaataatccaccttacatttttgaaacaggagataaaattataattgataaagaaaaaagtcttgtaaccattaacggaaaaaaagccattaatttaaaagattttttcagtaattttccaactgtaatacgtggtgaaaatcgtattgatatcatgccaccagacgttaaagcaactgttcgttatagggagagatacagatgagaacaccaagcggcattttgcatgttgtggattttaaaacagatcaaatgggagcaagctagggattccgctatccctcagactcaacgcgattgactagagtttgagggatgtagtggcgcgttgccgtgactatgcggttagtccatacctaatccacttcttccgggcaacctcaatggcagaacgcggagcacaggttaagtcgaatacaataacaatgaatttcagtaaagcccgtgacaaagcagaaattaattggagggaaggcacaccagccaccttccatgaacaacggtctttagcagaacgtctttacgaagctcagggaattgatactcagaaattgctgggccataaatcaccgaatcaaacagctaaatatcatgatgatagaggaaaggaatgggttatattattgccataagtctcaaatattaatagccttataaaaagcccttaaaattaagggcatggttttttattgaatcaaatctaaactttctttgagagattctaaaacatccaacattgccgcagatggtgtttcattattggtgtgcaccagaaaaaatggaggaggtagagggattcgaacccccgcgcgactctcgccgcctgtcggttttcaagaccgatcccttcagccgaacttgggtatacctccatgaaggaaaaaataaatattttattattatatgtctaaaccattagagaaaaaatggaggaggtagagggattcgaacccccgcgcgattctcaccgcctgtcggttttcaagaccgatcccttcagccgaacttgggtatacctccgagatatatacgtctaatggtggaccttgtaggactcgaacctacgaccggacggttatgagccgtctgctctaaccagctgagctaaaggtcctttatggtagcggcggaggggatcgaacccccgacctcacgggtatgaaccgtacgctctagccagctgagctacaccgccataaatgatattaatataagtggagcctagcgggatcgaaccgctgacctcctgcgtgcaaggcaggcgctctcccagctgagctaaggccccgagcaggggaaaaggtggagattgcctcaaaaccttacctattgctatataataccattcgtgaaaaaacgggtttccaaggggaaccggccgtttataaatctggaaaatatcgtggaaaaccaatgcattatgaccgggaagaagaatatgtaaaaggtttgcgtaacatcttaaaagatttagcctcaaatgttttaatacgacgtgttttatttggaaaatcagattttgattttgatgttcacctagagcaaggtggtattttactagtaaatacagccaaaggagaacttgcagatctttctaatgtactaggaaaattcgtattactaagtatgcaaaatgctgtattccgaagagaaccaaatatttcaccataccatcatattattgtggatgaattccctgattatggtacgccaagttctcctataaacgtagcggcgtgaaatggagaggctgactcttacacagcctaactatttgttcgaattttatgggtgaaactcccagagcaggggaaaaggtggagattgcctcaaaaccttacctattgctatataatactattcgtgaaaagatggattttcaaggggaaccagcagtttataaatcaggaaaataccgcggacaaccgatgcattatgacagagaagaagaatatgtaaaaggtttacgcaacatcttaaaagatttagcttcaaacgttttaatacgtcgtgttttgtttggaaaatctgattttgatttcgatacacatttggaacaaggtggtattttacttgtgaatactgcgaaaggggaattagcagacctttcaaacgtattaggaaaatttgtattgctgagtatgcagaatgcggtattccgtagggaaccaaacgtctcgccttaccatcacattattgtggatgagttcccggattatggtacgccaagttctcctataaacgtagcggcgtgaaatggaggggctgactcttacacagcctaactatttgttcgaattttatgggtgaaactcccaacagctctaccgatcggagtaacgggaataacaggagcaacaggaccaaccggactaacaggaccaacgggagatacgggagatacgggaccaaccggactaacaggaccaaccggagataccggaccaacgggaccaacgggactaaccggagtaacaggaccaatcggagataccggaccaacgggagatacgggaccaacgggagatacgggaccaaccggactaacaggaccaaccggaataacgggaccaaccggagataccggaccaacgggaccaacgggactaaccggagtaacaggaccaatcggagataccggaccaacgggagatacgggaccaacgggagatacgggaccaacgggactaaccggagtaacgggaccaaccggagtaacaggaccaaccggagatacgggaccaatcggagatacgggaccaacgggagatacgggaccaacgggactaaccggagtaacaggaccaacgtattgtaaatgctacagttagacggaacccttctggtagatattttgtgtcactattagttgaaacagaagtacaagaacttccgaaaacacattcttacattggaatagatgtaggactaaaagatttcgctattttgtcagatggaacacactatgaaaatccgaagtttttccgatcattagaagataagttggcgaaagcacagcgtgtgctttctagaagaatgaaaggatcttctcgctggaataaacaacgagtaaaggtagctagaattcatgaatacatatcaaatgctagaaaagattacttggacaaaatttcaactgaaatcatcaaaaaccacgatgttatcggtatagaggatttgcaagtatcgaatatgttaaagaatcataagttagcaaaagcaattagtgaggtatcttggtcgcaatttcgatccatgttagaatacaaagcaaaatggtatggcaaacaagtcttcttctcggataattttggtgcattcaacatagtcagagtaagcatcgcaatatgttgctaatgcattcacatctatgttcgtgattacgtctagctccaataattcaccagcaattctcctaaactctttctttgcaactgaatctaaccacgttggtggctttaccttgtccttttttgcttgcaactgtttttcagcttttaatcgttgttcaatttcatcttttgtcaatcgatttgtattaccttctaacaaatgcaaatgaatcggcttcgctttccttcctatgtgaaccacctcccttggctgaacccccttttatggaataaaacgaactttttacacggaaagctaggcggcggtctccaggaattcgccttttgctttttcatggtggggggatgtttataaattttttctttcgaattattttttgtttttcttctcatcttcttttgttttcttgttttaccatcgttccaaaattttgttcagcttgccaatagaggtcattcatggcaatctttgaaagaactttgctattttcatcgagtatcgctatctcaactcgtcccatttcattaatgtttttactcttacatgtaacatgggcttgcataataaaatcttctactggtccaccagggatgctctttttaacagctgccccatgccatccattacctgagccatagtccgaacaatagaattggtaactatctgttttcatttcaccaaccggattaccatcttccatagaactaaccttactccaccctacagttgtggacatatcatcccatataagacgttgatttctttctacaggcaattgctccatttttaatggcagtccaatacgaaaataatctggttcctttgcatatttatcttcaaaccatacatctaaaaaagtatgtggctttttaatatcaatttacattcccatctcctgaaaaataatagataaatttcggatgtctttacgtgttaaatcaatcaaatttttattttcgaagtgctgatgtattagaaataaaataattcgcaaatcccaattgtattgctgtaaagtgcttgccgctttcccttgtgctttcttttcaatgagaaaatctttaactagatttttattttcttggctaacatgcttttcataaattgcttggtctactattcgtttcacactgatcatctcctcaaaagtaaaaagagaagtgaaatcactcctcttgattgatgaattgaatcaaagccctatcttgtacaaaataaaaacagcttatggctgctttggttcctcatttattaattgttgtactaatacctttaattcataaatttcagctttcattgaaactttctcaagtttttctgcttcaagttgttctttaagagtaaaattctaatttaaatcctgattctgtaacaatatccaccatgtatgtatctataagtggctcataaataaaatcatgatctattgtgatttgttcagtcatttagctcaccttctatcggtgaaagtgtaataatcatttgttgctctaaaacgttccctatcacagcattcatccataaattaggattcatttttctcattaaaaattcgatgactacaattaactcttcggtagataaggaaacaaattctcctaaaggttcttgattgaacctgccaccacatttttcaattgttagacctacttcgttgtcaatcacgtacctttttgcagttactaaatcaaattgacggactttctcacggccgaatcctattattaattcctttagtacgtcatgaatgacacgaaaatctaacacttttactttctgttcaagctgctctctacgagtaccgaacatcttcgtgccaagtgcatttctgtctgttgcattttcaacaccggctaaagctttggtggcttcaagcatcgctttttgtccaccttcgccaccttgagcgatagcttgaccccatttttcaaactgatccgccgaaatttttgttttatctaaaaccgcttgcatagatttatctacacctgcaccaaactcagccattttgatacgtccttctttaacaccgtctaataggttatcgatattccaactcttagtatctactcctgctgacataattccttggacttctttagccgaaaatccagcttgaatcatttgatccccatattcagcgataatatctaattgttctggtggaaatcctgtttttaataatgtattaactagccccaatgcttcctcgttcgtaatacctaacgttgcaccaatctcattggtaggagaagaagtagaataccgaattagttttaaaaacacggtagaaaacggaaagctagcagaggtaaaaatagaagacaatttaccaaatggattagagtatgtgaaagatagtttacgagcggaaggtactaagccggatccagtagaactgaaagtgaaagatggaaaagtaatcgccaaatatccagagattacggatacagaagaaagaagtatcgtctttaaagcgaaagtaaaagaagaatttaaagttggtgaaggccttgtcaataaagtagttgttgatgatacaaaagatccaacaacttcagaagtaacaattacgccagaatataaagacggtaagcttaaagcagagaaatttgtaaacaataaaaaaccgaaattaggagaagaagtagaataccgaattagttttaaaaacacggtagaaaacggaatgtactgttgctgctcctgcccttgcagtatgctctaccgcttcatttcctcttatattgttttgtacattcacatctcgttgtaccgtggttgagcctgcttttacatcgttatttaccgcttcacttcctcttacattgttttgtacatttacatcacgttgtactgttgctacacctgcttttgcatcactattgattgttcctgttccacctgtatttcttaatgtatcttgaacgttcacatcacgctgtactgtttgtgtccctgattttatatttccttgcgatgcttcagtacctccggtatttcttaatttattttgtagctcaatctctcgctctgctatttgtctttcgccttttacattgccttgctgtccttcttctcttcctgtatttcttagtttgttttgtaattcgatttctcgttctgctccgtagcgtgagagacccagaaaagtgacacttagtaaaatcagtgctacagcaaggatgtagaaccaactggcattcgtgaatatttgttgctgaagtaatttaaaatttttgtcggctacatccgggaatacagcggcaaaagcaacaagaaggaaaattaacaaagcagatgtaaagaataccgctttgttaatctggcttttagacttctttgggatagtatcattttcactcataattattcattccattaacttagatccgcttaagatgataggcattgcctctcatatagtagcaaaaaatgagcagtaaatggggcatataatcagaagtcacgtcgtggttatattctcataggctttctccgattatgtatgcggtaatactctctcatcacaattgttgaaagtcccacggctaaggctcctagcgcttcaaaagtaagctttaaaatactcatgggatctgtaggtacatgttgttggctctgaatatagtttttcatacggttaaactcattgatgtattttacctttagtaacattgctttttgcgttgtataactcatagttacgagcataaacgcatcgaagtttaaaatgtatttttcttgtattcgattgcggttatctcgatattcaatgggctcaaatttgagcgtattaaaattaatacctagttcatccacttcagcattatgttgtagacttgctaatttcgaaattgtttctaagatatctcgttttatatttttgtgctcctttccaaacatctcagcaattgtcaaactatctgttactacctcaccattactttcaaataccagttcgtttgctactgttaatccattggatctaataaataatagtattacaaaattatcgactgaagttgataccaataacacccagtctcaaaaagatacattaagacgattaaaaagtgtaacaactcaactcgaagaacaagtttataaattttaatattaagaaattaggtttaataaaaatattataacgcaactgaaaataaggaggagaatcaaatgatgaaatttccatttaaggttataactttagccactttagcaacggttataactgctacgaatggtagtactattcatgcacttgcacaagaacagacagctcaagaacataaaatagaaaattatgcgttaggacctgaagggttaaagaaagcgttggctgcaactggctctcatattcttgtaatggatttgtacgcaaaaactatgattaagcaaccgactcttcaataaacttgattttcatttgaacagcttcttttgtgttataactcattgcaactagcgtgaaagcttcttctgttaagttatacttaaggtattttcgcccacgctcattttcataatttgactcgtgaaaatttacgagtgaaaattcaggtcctgcatattcaatttgttttctaatatctttcaacacattgtcatgtgtctttacaaacatttcagcaatcattagactatctgttactacttttccgttgttttcaaatactaatgcttgttcgtttgctactgttaaatgattcatgttactttcctcctctacaaattcggaataactttagttttattcgtattacgatgcgccaaatgcaattcattacttacttttttaaaaatcaaccaattatcaggattcaatccatatatcgtaacttacattgtctcggaatttaacgcagcatacttgtaaacgcggtttccctgttttacgtaccccatttatcattgctgttctaaaatgagcagataatgtgtattcatttccaggatgtatcccattattcacgattgcttctggatagttatacatatctacccttgcagcattcaccatttgctcgtaatcgaatatatgcgtattcttttctattacgacatttccccatgacttccaagtaagaccgtatccaccttcaaacccataataatcgttatgtccgatgtttttctttgtaacactagaaaagtcgggatctgctatcaggtttcgtcttgataccgcggttgtttttgttccccattcgtcttggaataggaaatctagcattttaacagttaagaagactacattgataatcttaaaaatttctggaatgtttcagaaacaaagttaattcaatttattttagagaatgatcaaaattattatgcatgggtaccaaaagaagcaaacatcccaaatatgtatgaagtgaagattgagagtgtcgatgtagaggaagttctataataagcaaattaaaacattgtgtatcatgagtaatgttgaaaaaactaatttatacggaatttaatgaattaagaggttaaaaatagtggtagtttggagaatccaactgccactatttttgtgtttacgaatggttctgtaaagtaagtagtgtgtttaatgaattcaatcattcatccgtccagcaacaattacagcaccgccctccaattagcggctagcatcacagccggactcgctgaagtgctttttcttcatacagaaacggaggaacgtcgtattgatgttcctcttgtaattaaggcagcaaaagatatggctgatttacaaaaggtaaaagaagatttagcggattggctatatacagagcaaccagctgaacttgtttttgatgatgaattagataggacgtatctagcattaattgatggttctgtagacctggatgaaatagttaatagaggtaaaggggttattacttttgtttgtccaatgccatataaattaggaaaacaaaatactcattcgttctctcaaaatggttctactgaagtcactgcttcttttgtcaatcaagggaatatagaagcacctgcaattattgaaatcgaagcacagaaaccaagtacatttttagatgtgtggtttggtccttgcggatggcctcttcacttgtttgatgcctggcagttccctactctcacatggggagaccccacactaccatcggcgctacggcgtttcacttctgagttcggcatggggtcaggtgggaccaccgcgctaaagccgccaggcaaattctgtttaatctgtatcaggctgaaaatcgtgtctgtctcttcgccaaaacaccttcggcgttgtaaggttaagcctcacggttcattagtatcggttagctcaacgcatcgctgcgcttacacacccgacctatcaacgtcgtcgtcttcaacgttccttcaggagacttaaagtctcagggagaactcatctcggggcaagtttcgtgcttagatgctttcagcacttatctcttccgcatttttctaactcctattttacaaggaattgctgatttcttctctatgatttggaacggtatttccacagtgattcaaactgtatggaattttattacacaatacttacaagcgatttggacggctattttatactttgctacgccaatatttgaaagtatcaagaatttcatttctgaatgttggaataccattagttctactacaagtcttgtatgggaaacaattaagaatttcttagtttcctgttggaatgggcttgtagcgtttgttatgccgatttttgaacaaatcaagtcctggatcattgctgtgtgggatacaatcagttcagcaacaacgtctgtatggaatgctgttaagaatttcttacaatcgtgctggaacgggttagtatacaacaattaataaatgagaaaccagagcagccataagctgttttttattttgcataaaatacggctttgaatcaattcaattcatagatcaagaggagtgatttcgcttctctttttattttgaggagatgatcagtgtgaaacgaatagtagaccaagtaatttatgaaaagcatgttagccaagaaaacaaaaacctagtcaaagattttcttattgaaaagaaagcacaagggaaagcggcaagcactttaaaacaatatggttgggatttgcgaattattttgtttctaatacatcaacacttcgaaaataaaaatctgactgagttaacacgtaaagacatccgaaatttatctattatttttcaggagatgggaatgtttttgagttacacagtacgaaatttatgagtaactgtatagatttaaaaagaaaaagcaatgcttagattttaaacctagtcattgctttatccattgcatcttggtttacgcctatataacgtaacgtgaccttctctgacgaatgattgaatatctccatgagtaatgctatgttttttgtttgcatgtacatatgatacccatacgtctttctcagtgtatgtgttcctatttcatctaatccaaactctgccgctgctccacttaatatcttatatgccatgctacgcccgataggacgattcttcccttgtctactttgtaataaatactcattatcttctctttcttcaataaaccatttaagttctcttttcagatatgataataagcctggaaaaacaggtttaatttatgagagtggtgattatcccaatacgtggaatcagtattatggtaggttgtggatcgctagaacgggtaatgattgggaggcgtatatttcaaagtttcttcctggaacagaaaaagatgatgcagagcgttttgcaagatggactgataaagacaataaacatatggaaaaagcagctcaaatacaaattagtatcatgcagtggcaagatgttccgccagtagaagcgatgacagtttctgatttgaaattttggaaagtgaatttaaataatcaaaatacaccaccttatatagtcgatgttggtgacaaagttgtgattgatacagaaagcagtcatggactttgaggttcaatgcatgtttttctgaaagcaatttcagtatatcaattaataagggttcagcaggaaaaaataaacgggtagcaacacatttttctgctttttaggattgttcgaacaataaaacgccatcttgttcacgattttctaagaagatgctgaaatattttgaactttcaggagacgaaacgaaaaaaagccggggcgacccggcaaaaaacacaatgagggagcaaatgttaatcagtgatgaaccagtcgtcggcgctttcccatgtttcctgcaaaatttcgctgatgcgttctttgtcttctttcgcaccgccgatgacggaaagatggtttgctgtcgcaaacatcctattttttcttattcccccttttcgaggggatgggcaaaaacacccaatttttgaacatttactacagctacacccatttgtgtattttttggtagatatgatggtatattattttcattccataaatccaatttatacagttcttcttttgcatctagttctaaaatatctccacttgcaatatcttgtactaagctatcaaaatatgattttttgattccattataacttccataactacctaacttacttcttaaattatgattaaaccctgaagtttttggtggctctacatgggattcagccgagatacgtgtaaaaatgggtcatagcctggaattcgtttccggatgcagcgtctataaccagttcgttgagcgtatgcaaaccgatacgctggaatatcgttgtgatgaaaaaccgctgacggtgaagctgaacaacccgcgtcaggaagccagctttgtttatgacaataagttgttgacgctgaagcagggaatgtcggcctccggagcgcgctactcagacgggatctacgtcttctggtcgaaaggcgacagcgccaccgtctacaagcgtgaccgcattgtgctgaacaattgtcagcttcaaaatccgaagcgttgagatttttgaagggggcgcgcacaatagcgccacccaatctcactttcagctaacgccatgtcagataacaactagctaaagctttttgatattcatcttgtgctaacttattattcgtagcaaagcgatctacagaagtaatactgtcttcagttgctttttgatatcctttatatgctaataccccaacaccaacagcggccgccaccacacctaatgcaattgctactggtcctaaaactgcggttaatattcctaaagctgcacccgttacactagtagctgctgtagctacacccattgctatcgctaaagaacctataccagaaacaaccataccgattgcccccattattactccaataacagtagcaaccgctgttagcgcaagaacaataccacctgtaattgcaatggataatcaattacagcaagaatacaaacaaggcacacaagctttacaaagattaacagctcaagtttctagaaatgatacagcatttaataatgcttcagcagctttacatcgatatcgtaatgagctaggtgatacagaagaaagaatagagcgattgggtaatgtttctggaagattacgcgagcgtatgaacgaagttggaaacagtatgcaagaaactggtacgaaagtgagccaggggtttggtgcagcagcagttggcgtggcggctggagttggagctttagttgtaaatgcaagtcaatttgaagaagcgaacaagaaggtacaatctggtttaggatataatcaattacagcaagaatacaaacaaggcacacaagctttacaaagattaaccgctcaagtttctagaaatgatacagcatttaataatgcttcagcagccttacatcgttatcgtaatgagctaggtgatacggaagaaagaatagagcgattgggtaacgtttctggaagattacgcgagcgtatgaacgaagttggaaacacaatgcaagaaacaggtacgaaagtgagccaagggtttggcgcagcagcagttggcgtggcggctggagttggagctttagtcgtaaatgcaagtcaatttgaagaagcgaacaagaaggtacaatctggtttaggatagagacgggggactttgattcatgggtcacttccttcatattacgattgagctctatctagtcaacattaacattgctttagttatttcattaattataaagagtcaaactgttcaaggtaattcgaatgcaacgataacacggtggcaatacaattagtcatcgttcctgcattacttaataaaatcaataaatttctttcttcatcacgatatgaacaaccatcccaattacgattatcaagtttactttttagctgcgcttgagtttttttaagggaggaatccaagaaaaaagttattccataattttcaataggcataacacaaagctctctttcaattactggcgattgttgaaaccgccatgcaacagcaccgtggctgggtgaaagccgatgacagcccgctgggcgggctcaggttaacgctgtggctgccgctgtataagcgttcgtaaccgtatgtgccgggtggcggcttcgccttacccgacctacaaggcactggcgaacgacagatagcaaaaaggcgcctttagggcgcctttttacattggtgggtcgtgcaggattcgaacctgcgaccaattgattaaaagtcaactgctctaccaactgagctaacgacccattcgggtgttgcctgaattatcactcggtaccaataaaattggtgggtcgtgcaggatagtaacaatggatcattcttttgaatcgcctctatttgtttcttttcacaatgctccaagaattcatctagtatttgttttttctgtatatctttctttaaaattgataccgtcatagcgctttctcccctcaaattcattccacatcttttgtaaattctttaattggcttatctagtgcataaacaacaagtagaagtccacagatcagaaacccagtgatacatactgaaaaaacactttcttccatcatggttatttcctccttccaacttttttacatctcagaaaacttaatttgagagtttactatattaattttctcactcagcacaataggtaacgttcactttgatgatcaacaagattttgaacaagtgactcaaaaccaccataacaagccggcacccccacaatcccaatgatatcgatatttttttttgcattctcattacgcatataaaacctaaatccttagcaaggatatgcatttcaatttgatttgataaagtctttgaaattatatctttttcgtattaaatcagataatacacgagcactgacaaaaattaaagaaagggcatactggaaaatatgtgatacgttgtttttccgaagtagattttccttacctttaatttcacctttacgcattttaattaaattaccagacaccccgccagtagtattattttcgatattagaaattgtacgactgacaccttgtaaaccttcctgtacttcattgaattgtcctgtagcttgattctgtgcttcttgtaccttttggtttaattctgcttttgtggactcaatatttttattaacctgctcaagtgtttcttttttaacggattcaacatctggcacaaccgattcccaaactgtacctgtccatatttttaaaatgccgggctttccgttactcatatcacgccatagcgttttattaggtttaagccctgttgttggtggattcttagcttctataatttcaacagtattgtttttaatattctcttgtaccttttggtcatgaggaacggaataaaatgaatattcattcgattgatttgcatcgagatggagaaacggtaaaagaattttatgcagtgtctcctatcgatgtggaacaagaagcgatattatccattgaatttgaagaaatgacgagtgtacttgaagaaaaagaaaagtcaattattctgcacgtcggtgaagggtataccacaagagaaattgctgtgaaattagagatgaagaaatctactgttcaaacaagaaagacacgggcatttttaaagatgaatccagattataagccaatcaaacaaaaatcctttttcttggggaaaagaatgataaagagaaaacacgagctaaagtagatgttttatctcgtatggtagataaacaaaaagagaagatcagggaacttcaacaagcctataatcgtgctaaaactgaagaaggtgaagcaagtcagtcagcgcagcggtacgccgaacaaattcaccgggcaacaggtgaattaaatcgatttgaaaacgaattacgtcagtcgaaccatgaattagaacaacaaggaaatcgtttattaaacttcggtactcgtatggagacgttaggtaatcatttgcaaaatgctggtatgcaaatcggtatggtgtttggcggaatgacttatgcaataggtcggggtttaaaaaccagaaatatatattttactcatatcagactcaggaaaaggattttcgcatttataacactcttctccaattacatcttcaaatggatttaacatgtaaatcgctcctatgatttatatttgtttagcatttcttgcaatctctcacgctcttcatcaatagattgcgagttttgcttttcaatttcttttttagttggctcaacatcttcacgtaaccaatctggaacaatttcttttctatttgaacgacctggtcccgaaccattcaatcgcttattcttactcatttcaaagcgtctatctaatgcagcaacatcatctaatgtttttaattacatggtttataacgaaatagggatgtcagagcgtacttatcgccgttggaaatctaaagcattttataagcttgcttttgcacttggattagaagtttatgagacagaagagactggaggtaatgaataatgaattttgttcagccgatacgtgatccagaagaaatacagcagctaaaagaatattttaaagaaaagagcttacgtaattacattctcttcattatgggaatcaatacaggcctgagaatctcagacattttgaaattgaaggttggagatgtcaaaggtagtcatatatctatgagagaaaagaaaacagggaaacagagtccagatgatattttaactcgtgaacaaatggcacaagtgcttacaaatgctttcaaattcaaagctactaagacaacatcgtttactgacattgataaaaactcatgggcattaaaagcaattagcgcattagaagaaaatggcgttactattggtacaggaggtaatatgtattcaccatatacacatgtaacccgtgaacaatatagccaattcttatataactctattaatgcagtagaaaaagaaacaaaaccagaagtgaaaccagatccaaaaccagaagaaaaaccagaagtgaagccagacccaaaaccagaagaaaaacctttcagcaagtgctccatcagcaaatgtatttaaatcaatcatgacttccattacttttctcacctaaacctttcttattaaaattcaacatccacttgaatatcgatgttcataggtagttcttgagctacaataattgaattaggactcgttccttttttaatcaacttttgaactccttcttttgcggcatcctttgttttgtatccaaaaacatttggtgtactggataaactcgtaacaattactaaaatttgttgttgcatgattgctcctcctactgaacttccgccatatttatttgtgcatttgtagctgtaatttgaagataagtggaatacagttgaaaaattcttcagcactataaatctacgttccattggtaaatccattatagaaggtcttgaaaaaggtttggatgatgcgacagatggtttatatagtaaggcgaaaggcattgctggagagattaaaaagactatttctggagcactagaaattaacagtccatctaaagtgatgattccagttggtagcgcagttccagaaggtgttggcgttggtatggataaggggaaacgatttgttgtggatgcagcaaaaaatgtagttggaacggttaagaaacagatggggaatatgccatgacatcaatgttgtgtataagtgcgaccagtgcttcggttttacgagaggcaagattgctgcggaaatagctggaaaggcgttttttcagatcttttgccttaccgacatagataaccgtaccgccagcgtcgtacattcggtagacgcccggctggctggtgacggttttcagaaatgcttttgaatcgaacgcttcactcactgacttattaacgactccgcattgcacaaaccatggcgaatggccaggtgagtcagttcgacatcaccgtgaatgttcaatttactgaacatccgatagcgatagctgttgaccatcccgaagggattaaacctggagcactgtccagtatgttgcggacactctccttttggccctgtcgaattactatgctttcggcatcagcatcacattcaggctgatgatggatatggcgtttctttttaaaataagctctgacttttttatctttttcccatgcagcaggatacatggttataccacatccccagcacacataaccttcagtatcaacgctatccagcaaccagaggtcctccgcttccacgatctctccggtgcgtttatcacgagcagattccatcacttagtccttatgtagaacaaagaatatgcatctatgtataattgggatcgtgctgcagcagaaagagcagatggtattcaaccgtttaatgcacttgctgtaggtggtgtgaataataatataactccagcaccagacggacaaacgtttgatataagtactgaaaaagaagtgaaaatctttaggaatatacgagcaatgcaagggattaacttaggtggcggtggattccaacaatgggggcatattcgttttacagacggaaatgctggagcgggtttttatgtgagtactccaagtggttggaaatttaacgcacttggatagaaaggaaggattaaaataatattctgaaataaattgatcaaacaatgatcagttaactctcttgttatttagttgcggtattaaaagcagattaataattattagggcaatggaaaggggttaaatttgttagctgagtgttaatttcagaatgtttacaagcgcggcgtattacttttcaatacgtagacgttaaaaggcatttgatttactatttattcagaagcaacgtaacagaagattttaaatttattactaaccacaacgtattcagtgttattttcggccagaagtcattcctcagttgaaggatatctgtgtatggccttcttttttcataatttgtttttataacgatttcttgtataattagggaaagcaaggggtggtttataaccaacccgcttgcttatagattgagcgaagtgtaccttttggaatatccttgcaaggatgtttcacagtcactttaccaatcttagaaggatgtttgaactgatggtggctgccttcaatgttcactataaaccatccttctttttttaacctcttaattacttccctactagaaatcgttattacctcctcgtatgataaagttaggttttttaggaaagggatttacctataaacccgtgattttttacacaaataaaagacctgaaaacccttgatgttcctgtattttcgatagatttaacccctttatttttggggtcacacaacccgtattacataggggggttgtgacgtcatcattcatagcaaattcttaaccccaaaacagatatttttgtgtgcttgtccgagatgctttttaaagaagtgtgagaaattctcaacctttacctgcttattagagtaacaggtaactttctctgcacctctactcttttttacaaacaaaacgtatcaagcacattgtctttttcctctttgttgatacctgcgagatgtggactcagcgactccatcgccagcagcttgctgacaataaattgagttttcattacattttcaaggatagttttattatagagcgcctgattaaaggaagactcttttctttccatttgcgcttcatagaccctaagagcaagttcgaccagcattgatgcaatgcttgaaaaacttacatctttatctctcgctccttcagcgcgacgtttttcagcgattactcttattttctctgaaacttcatcgcttacatatacctgaactctggccataattttctccttatttatattaaaaaatgttctgtcttccggcaaactcgtcgttgaaggtatcaacctggttaagaaacatcagaagccggttccggccctgaaccaaccaggcggcatcgttgaaaaagaagctgctattcaggtttctaacgttgcaatcttcaatgcggctaccggtaaggctgaccgtgtaggctttagattcgcagacggtaaaaaagtccgtttcttcaagtctaacagcgaaactatcaagtaatttggagtagtacgatggcgaaactgcatgattactacaaagacgaagtagttaacaaactcatactcgccaatttcctaatatttgttttctcattgatcatcgtttctaaaaaggaaaaacaacatgggtaagtatactgaggcattttttgctctgtcgactgagttcaaagatcgattgttagcaattggaaaagataaagtgcctgttaattattacactcgacataataattggggtgatcagcttaacaaatatttgattgagaaaataacgaagaaaactgtagtaaaaaataatttcaaacaatcacctcatatacttgcgatcggtagtgttttgtccagtgcatcgtcaaaaagtattagagcatctgacttttaatcagagggtcgaaggttcgagtccttcatggctcacttttgttttttccgcgcggtcgtggcggaacggcagacgcgctaggttgagggcctagtgggggaaaccccgtggaggttcaagtcctctcggccgcatcaaaaaaatcttaaaaaagtacttgcatttgaaaatgtagtatgataagataattgagtcgccaaattacaacgacgaaaaaacatcatgaataagcgcccgtagctcaattggatagagcgtttgactacggatcaagaggttaggggtctcagggagtttagtctccaggattaccggggcggttcagaacgatatcaacccggttcatagttatttttattgatatcttgaatacaaatgcaatacgtttgtatttcttttataaaagacgctttcgggccgtttcataggctttttcgtcttcccgtttacctactgcgaccacccatataacaatctcgtcatcgataaccttgtaaatcaaacgaaaaccagatgctctcagctttattttaaagcagccagccagatcaccatgcagtcgggctgattccacataagggtttcgtttcaggtcaaagtcgattgttgcccgctggtcacggaagattccgcagcgcccgtggcgaaccaggccaccctgctccaccgctacgcggagatatttctccgctgtggtccggtgcaggccgaacatcgcaacgacgtcattcgtggtgatgcgcccctgctccttcaccagttcgataatccggttgatgatcagggcgcgttctttgtcggttttctttctggccatcggttattccctccctgtcagctgctgcacgagatttctgtggctactaataacacgaaccgcgtgtccgtttgtaacctctttatcggtaaaacggcgcttgatgtcattggcatgtgacagttcgtgggcatcctgatattccttagaattgacatccagaccttccagcaaagaatggtcatgctcgtgttcctggaacgaaacatcataatcatagacatgaccacgatgacctaaagaaagacgtaccgcaaaatcatgaggttcaggaatgggtaatcgggactctaaatagtcacccttatcaacaaaatcaaaaagctgtgaaaacttagcagcctcccgtgttgtgatcagcgggcgatgacagggttggttgctattattccgataatagtagcacttgttgtcgctttaggtgttgccatttataaaaattgggacgacatcaaacaatggaccattgatgcatggaatgcaattggggaattcttagtaggcgtatgggatggaattgtacaatgggcaagtgaaacctggaatagtattagtgaatctacatcggaagtttggaattcgattaaagaatacttaatagagttatggaatgggatagttgagtctttatctgaaatatggaattctattgttgaaacagccagcactaatggaatggcataccacagcgcgtcggtatttaaggaagctgtccagcgccagtaaatataattagcgcctaaaatcagcgaggcacccgccaatacctgccatgttaacatgacccatcgcggtgtcttaagcggttcaggcggctggcgatgttcaaaacgggtaaaataaaaatccatagagaaggatatcctgtttccacgatagttattaattacagacccgttactgacagggagcgcaaaacggaaaataacgtccgtaaacaaaaagtaaagtaagttgccattgccccagcgccactgattgcagtagtagcagcgccagtaatcatacctgctccaaaaccaccgatcccttgtaaggacgctcctcctacaactcctgataacaacaacggtaatttattcgtcaatactaaaagaataattgacgccagaagtaaaacaataagactattaagatcaggaatatcatttttaataatagaaaaatactgatctataaatgattgcccaatcccaataattaatgtcatcgtaaataactgaacaccaatcgataatactgtgcgtaagtcgcgattaacataccgttttctgatgataattgtgagtcttcattttttaaccaacttttcatttttgctaacattttatttcgtctcctttatatatcgattttaagaatctactaaaattagaacttatctatttaaatctttaattacttattccaagaatttacgtctgcattgcttgatgcttttgtgaatcgtgccaggatcgtatcataaccaccttggattgctttccatacaaacgggccaattactaatacgataatcaccgctaacgcgattaacataccgttttgacctgctaattttccttttgtatgtttaaaaagagacatccactttaagaaacggagagctttttcttccttaaaaacatatggaaaatcttcagatccttcacgttcaatatctcttaaaaatcgcttacaagcttgtttatgcttctgacaagcaacaacctcgccatttagtacatcatcacagtagtccagcatccattgtctgatcatgttatacgtcaaactccttttctacgtttgttttcggaccttgtttactatttggaatgacaattttcgctcttgcactcgtaaagggaaagcgctgccactgatgctgcgtttctgctgggcctcggtcaccgataaaaagggttatgaacccctcatattcttcaggaaaggaacccgggagcagatgaccacaccttatacagacagccgctgggacgaaacctactatcgttcaaccatgattattggtctggctcctgagggtaaggtgagtgtctggctgggagatcgtggtaatccggtggtccctcagtcagatgccaaaattaccaccgtatccggtgacaaaatgcagatgtgtaagggagtgacgatcggggggcagagcactcgttccgtgagtcttgcttacgagaaacacctactgaagaatcatgatcttacattgatctgtaaaatctatcaatatcgagaaattgatctataaaaacgatcgattgattcaatagatataccgaaagttacaggaattaagattaagtatatgttattcaagcgttttaagttttttgggattgcatgcgtgggatggaaaactcctctttgctggtcgtgttgagaaagatttcaggctcaactaggcaaacccacaatcctctttgcatctgcgatgatattcccttttttaacttctgcaaggattccttcatcaagaaccttcagtttagaacctgtttcttttacataagcggcgtaagtctcattaataaatttttcttgtttcttcgatgttatttcgacgccttcttcagtagcactaatacttctttctaattcggttacttttttatcgtaatctttagttgctactctattagcaatatcatctatcattttatcaatatccgtttgatctttcggatgtaaccaaaattctgtagctatagtgccacgttgtgcacagagagcgaattgtattagttggtttccgccgtgatcttaaaattcacgatggatttacccttcgcaatattcataaattctacccaaaaaatcgtccaacatttggagagttactggatcctgcagttgacagtaaatatattttgacaccaaaactctgggaatacctgtataactatgccaagaaacatgctgcgaaaggcaatggttttgggtttgggctcgttgaccctacaaatgtgaatagtgtggcaagaactctctctgcacgctaccacaaagatggctaaccgtttctgttgaaataggataagctgttacacgtttaaatggtgaaactaagtgccatccttgtcctaaggtctccttttcaattcctgtacttctgttataaacaacacctgcatgtccctggtcaatcacctttacactcattgcagttaaaattccacctgttaaaagactgaatcctactactgctgcacctacgattttctttgtattcattttatttttcctccttgaacatgtttttaatttttaatactacgtttccaatacactcaaaaactcctaattgcagtgtccagagccgtgatttcagttgctgcagttgtagcatctaatttctttgttccatcagttgaaactgctaaattagcagttgttaatttctttgtttcgatagctgcgattatcattgtatcacttgaagcatcagaaagttgaatcgtgatatctttaccctcatcaggattagtacctttatttaaaaatgcgttaccattgaaatttgttttatcagcaatatgattaatttcttgtgctaatgcttgatactctttgtccatagatgcgatatctttatcgcgcgattaacataccgttttctgatgataattgtgagtcttcattttttaaccaattcttcattttggataacatatttaaattcccccttatctatttatttgagctatacgttacaaacatcattaatctaaaacttttattacttattccaagaatttacatcagcgttgtttgatgcttttgtaaatcgagctagaattgtatcatacccgccttgaattgctttccatacaaacgggccaattactaatacgataatcaccgctaacgcgattaacataccgtttttgaggggagtgccattgtttccacaaccagcagcctgaacggtaacttctcctagaagcaacttttgtttgggataatcgtccatcttgatcttcccatcgagaccgcgaccaatcaatagatattcaactttcacctagcatcctcctgcttctgataaccggttcgttgcctttcggcaaaatgatagaacgttcccgataatatcttagacactcaataaaatactctcggtactgctcaggttgttctcaggccatctgctccgcgatgacgggtatattcaaacggaggcttaaataaatcagcattaaagttaagaccaaccataagatcatcatcacttaattttaggcctcgtttaattttattgaatataatgttctttttatactcaataatctctaattcgtcataaatatcggtaattgtatttaattttttagatagccacaattctgatattttattacaaatagctttctccttgataattctatctatttcatcctcaacatacgaatggaggcagcttcgtatggtatctagaaatcttgcgcatgaagataagttcaattgcttccacaacttcaatattgaagtatttttcagcttcttcaccacttaaccaggtctcagcatctactaattgctgaattacttcaatttcgatgccttctttcaagttttctttgtatacattcataattccagcctcaagattatccaagtcctctgccattttacgaagtacatttgcatttcctctacttacagtccatggtttatggaccattaaaaaagcattagaagggacaacaacacgatcaccagccaaggcgattacggaagcgatagaagttcctggcaagagaaaacaaatacgcttcttcgggtatcactgatgagtacgaaaatgttttcattttcatgaagcatgacaaaactgttaatcgccacaaaacaacaaataccgtaacaatcagtactactgaatgcctcggatattgcccgtccgcaggcgagagcaagacacaactcaattcttttttgagcatgaccaacattcttttcaggactcacgttctgtacaacttcgacatattttatgtttccggttatctgctggatgtgctgaaagaaggccatttggtgctttttttatttttgttgtgttgtttttgaagatgcggttatctcaaaaggcaactcacttataccacttctcgaatggagaggataattttagcaatatactaaagtctagatgtcttatgtcattaacaggcggtagatgttatgctacatctcggttcaatcctaatctgggtgttagtaccgtaggggataaaaatcaaaaattctttatagtttttagaggcgaggcagtctcttttttcaaacccattgtcagcaattgcagagattcaatttttttggctataagcgctgaaatctcttcctctgccttttgtgtcagtgcgtcaactttcatctttacctcttacgaccgttaactgtatccattctctaaatggttttaaccataaccctttgtaaagcgtagactatctgcgttacgtatgctgcattaaccttaagatgagcagcatgatggagccgtcacatttaaacatgcatttatgttgcattatttgaacaagctgttattgtcccaaagccttagagcacataaacataagaaaagttatatcgatagccatgtagttctttggcgtccgcaaagcttcgctctatagttgaacagcgtactttgtacaactttttccctgtaactgttagtttgttttttttaacgatatccttatatttctaccatatatgatgagtgataactttttgtttttgtttctttgaaaaacatacctcacgtagcggacaaacagcgcagtcttctgggttggatttatagtgacgatatccttcacgatccgttgtcgcatactctaaaatacaccccatcggacaagcctgccagcgccatctcctcgtggagcggcttcgtttatcaagggaaaattgcattatatcattcccttaaactgattcaggatggcgacctggacttcgagcttcaactggatagtagtgatgacttcgctatttataaaaacgaaaaactacacaccgcccatcaagtcaaagctaagataagtaaatatcgaagtggttacacaaaagcgctggaacagtctacattaatcgaacacgacaaaatcaaggggacagcgcgttacttccatgtatctaaaccattaatgacaatggcggctctgatacttttgaaagcaaagtaaactaataaccgcatcaccgccacattataaatataatacgtatgaatgattcatagcattcatacgacgacttgtctggatgaagcatgctatttcaacgatcaattttatgtctcgcaatctgtgcagcatttcctctgcatgccagcgagactgaaaaaaaagctgtagacacctcatccgaaacagaatcggccattgaatttaatgaccagttccttatcgataatgattcgccagcatgttcaccagactgaagggtaaacacatcagctttaaggccgctcagcacaaagcccagcaggactttttcttcttcatccacggccttctggcagcgattgatgagttttgtcgcttcaggacccgcaacagtgacatcgaaacgggtgtaagacgcgttgtcaactggaccggtgagggcattgataacggcgcaggtaaattcaccgtttggcccctgtacacgacgaatcgagctcaggtagccgataccggtgacattgaaaactggtgaaagagaatgaaaaaacaattgaaaccatacgaaaagaatctcaagtagctaaagagttggcagaaaaagttcaagaaaacctaaaaaataatacggtaaatattattgaagctaaaaatccaccaattgataatcttatagtaggtaagacgttatggagagatattagcaacggtaaaccaggtattttaaaagtgtggaacgggaaagattgggagcttcttattcctgatgtggaatcaattaaaaaagatacactggagcagggtgtggagtgggggaaaaggtagagataacttcaaatccttacctatcactaacaagggagtcatggaaacttaagttcatattgtgtaggtctaaaaggaagtgctcgtatagggtgtattaaagatccaaatatctccatcgaagcaggcgtacaagaatttaaagatgttttaggaaaggcaaatggagatatagcacttgctttacagagttacaattgtgcgacacgttcctaactgaaaaggttaggcgctgattcaatattcagcagaaatatcgatagccatgtagttctttggcgtccgcaaagcttcgctctatagttgaatagcgtactttgtaaaactttttccctgtaactgttagtttgttttttctagcgatatccttatatttctcccatatatgatgagtgataactttttgtttctttgaaaaacatacctcacgtagcggacaaacagcgtagtcttctgggttggatttatattgatgatatccttcacgatccgttgtcgcatactctaaaatacaccccatcggacaagcgcctttgaatcatatcgacataccatccaactatttgtgacccttgaacctcaacgcggtattgaatttctaatttgaacaaggaagctattttctttaaaaaagttaacggatccataaattcatcaatggtcatagtatgaaaacccgcataatctgttttcccacgtttccatttcatacctacaagagccatatcaataaattcgtttactgttttgccttctatcctttgtggttttataatgcctgatttagcaatttgaacccaagctctgtggagtgggggaaaaggtagagataacttcaaatccttacctatcactaacaggggcaatatggagacatgagctcatcttgtattggtgtaaaggggaatgctcgtgtagggtgtattaaagatcccaatatttctatagaagcaggtgtacgggaatttaaagatgtactaggaaaggtcaatggtgacattgcactcgctttgcagtcgtacaactgtgcgacacgttcctaactgaaaaggttaggcgctgattcaatattcagcagaaaaagccgcggcatgcttgtctcctccaatacctattaccagaacatctccatcctgcgcaaagggctcaaaaagattggttttgaaactgaccctatcgttaccattccgcggattgggttgacgctggcaagcgacacgcaaataaccgtcagagagtcttcacctgtcgcgcctcaacccgcagaggaacaatgtgtggaggcgccagcgatcgaggaggtctctgcatcctccgcgccagcaacgcccgttgccaggaagcccacgcgctggccgcttccgcgaactcagcccgtgcgtgattattgttgcgctgctgtttgtgttgaagattgtgtttattgattcacactaaaatgctggtggtgtcaggtggcgcttcgcttacctgacctacgggcaaagttccctctccctgtgggagagggttagggtgagggcaaactactgcgccttagccgcctcagtttgctgagtttcagtcggctccagctggaacaccacattaacctgatcgtcgaactgaatggttggctgctcgtaggtagcaaccaaccctgtcatcgcccatcctatacttgttataacagcaactattggcgctaaagccatgaatgctcctgcaattacaccaatagcaactgcgatagctgccaaagtagctgctaattcaggattattggaaatccattcagagaatttagagacaagatctgctataacttcaagaacaggctgaagagcaacttgtaaatcttgcatggcttgttgaaatttaaccgctggagatgcatctattttagaagtagcaccctgtagaagaatcaagcaggcgatagaagctaggaagttcgaattaccagagtatctaattcctatgctgcagttgttaaaaacacatacaacattagaagcagtcaaaaaggcgcaaatatatgctggaagacatcttcgtccgtatgtatctacacttactgcggaattagaaatgtatgcaggatcggatcaaccatttcgaaactttgcagcagccttaaatagtccagaagtaaatacctttacgattgcattgcaacaagcgcaaaaaatcaaacgtcatagaattccttgtggtactttgtttagctaaacaaatcagagagtaagatttgttgaagtattgttcttactaaaattcgatatatccgttgtcagaaatgaaacatttaccaacagtgtttgctataaaggttagctaaccaaatttctaaatcatgtacaaccccttgctatttacattttgtttcattttatttgtagctatttagtttagctaaacaatttatatttgccatgtataagctgtgtgtttatccatcaagcgataactgctgtctatcccataacacaactgcttctttcaggtccccaataataaatggtgctttaccatctttatctgtagcaattgtcttattagataaaacaataactggctttcctgacagtaacttacgagttggatttgttggatctggttgaagaagtggacgaccatccttatcttctaattgatctaagtaattgaacccatcttggtttgtaataatgtttgctacagccgagaaagctgggtctaatgtgatattatctgcatcggtgatccacacgccttctgcttttgtgatcgctaaaggcaatttgcgcggataactcctgacgttagattcaaattcggcctgacgggccagataggtttcgttgcttttgtgggcatctacggtgtcaatacggactttatccgtcatcatatcactcctacaaccgccgcttcgttatgagccacgattgaataaaaagttaaaaaacagatggggcctgaaaaaaacgccgccaatatagagccttttgtctcaagcgataactgctgtctatcccataacacaactgcttctttcaggtccccaacaataaatggtgctttaccatctttatctgtagcaattgtcttattggataaaacaataactggctttcctgataatagcttacgtgttggatttgttggatctggttgaagaagtgggcgaccatctttatcttctaattgatctaagtaattgaatccatcttggtttgtaataatgtttgctacagccgagaaagctgggtctaatgtgagtttggttagcttgagaaagcatgctgatgcctgcttcgtttaaaattttgaactttgtcatgttagacatttcttttgccatatcagcatcttcaatttgagaagcagaagctgccatattagtagcttggctcgttacgttgtttaagttatggtctaaacggtttaattgagaaccgaaagttgctctagcgtcagcaatttcttgaatagcagtgtccagagccgtgatttcagttgctgcagttgtagcatctaatttctttgcatggcggttgtggcgaagtggttaacgcaccggattgtggctccggcattcgtgggttcgattcccatcagtcgccccatttttcttaaataaattaatatgcgggtgtggcggaattggcagacgcaccagacttaggatctggcgcctttggcgtgggggttcgactcccttcacccgcacttttaattaaataactcatacatgtcttgcggaagtagttcagtggtagaatacaaccttgccaaggttggggtcgcgggttggatcgtcagcttcttgtcattacgcatgacttcaacagggatgatggagcccgggcgaatctcagccacctggtccatggtttccagcgcagagaccgctggcgtaccgttgacggaaaggataacgtcgttcacctggatacctgcattggccgccgggccgccaggcgccacttcgttgaccacaatcccctggatctgatcgataccaccgccctgcgtatgcatcggtgcgatttcacgcccaccaataccgatgtagccggtgtgaagtgggggaaaaggtggagatgatgtcaaaaccttacctatcactatacggtcctggattcattagctatgcattagcaagaggtggatattcagaagaaacagctattgcgttttctagggagcatgctgatgaaaatagagctggctgttctgatccaaataacttccgaaccaaagtcggagcgtgctatggggattacgtgcgcccataagggggcaaggaaaaacggtgattgcaagctgttaggtcaaccccggtgtgaagtgggggaaaaggtggagatgatgtcaaaaccttacctatcactatttggcgaaggttttattagttacgctttagcaaagggtggctattcagaagaaacagctattgagttttcaagaagtaagaatcatttaaatccaggtggttgctccgatccgaataacttccgaaccaaggtaaatgcgtgttatggtgattttgtgcgcccataagggggcaaggaaaaacggtgattgcaagctgttaggtcaacccttggtcctgttactccggttagtcccgttggtcccgtatctcccgttggtcccgttactcctgttggtcccgtatctccgattggtcccgtatctccgattggtcccgtatctcccgttggtccggtatctcctgttggtccggtatctccggttggtcctgttactccggttggtcccgttattcctgttggtcctgttagtccggttggtccggttggtcctgttgctcctgttattcccgttactccgatcggtagagctgtaatcgaaactggtgttatatctcggccaaaaaaaacattgtgcttataattttcaaaaattgaaaataaagacttatccatcaagtgtccaaagtcttttttataatagtcaaatttcaaagccccaacatttttattgcacaacaaataaatacggtctgggcatgcatcgtctgttattcgataagggaaggaaaatgcagagccttctatttcccagttttcattgatctgtaatctttcatcaaccatgccctgtaaattaaacacgagctaaagtagatgttttatctcgtatggtagataaacaaaaagagaaaattagggaacttcaacaagcttataatcgtgccaaaacagaagaaggtgaagcgagtcaatcagcgcagcggtacgctgaacaaattcaccgggcaacaggtgaactgaatcgatttgaaaacgaattacgtcagtcgaaccatgaattagaacagcaaggtaatcgtttattgaattttggtaatcgtatggagacattaggtaatcggttttttatcatccggtgattgatgagttgaaagttgtaaaatacattgagccagagaagaaaattgaaggcatctactctgaaataatatatccggatggaagtgttgtatctgatgggacagtatttcctgatttttataaagtcgaaaaaatgaatattgataagtgataatagatgggttttatgttcaagatgtattatgttaattaactatcacgcttctgcgccagcactatgtatttgagatttgctaaatgcacaagaggaagaagaaggcgaaacgaagaaggataagcctaacttccaaacaacgaaactcaaaggttcatttattgagcgtgattttgacgataggcctaaatttacagctgatgctgatgaacctacatttacaaaagctgtgggagataattggtttaaaaaggtgtatgagaagcctgtagtacaatcaccagcaggaaagtaagggggagcaaaagctctctcttttttattaacgaggaggaaaagccatgaaattttattttcctcttcactcgtaagaacatatgaatcagcaaacaattttctcaatcgttccgtttctttttgcttacgctcatcaactttcgtaatgattttctcagttaattgatcgtattgttgaccaagtgtttgagcttgttcagttgtcattacttcatgattcagtttaatttcagttaacttttgtctaataccatcagataacttaaaatagtcgccaagaacttttttagtcgatgaactaatttctccggcaaggatacctcagactgtcgcaccaccggaacgttgggcagagttgccctggggtgaatattatcgcgaggccttagaacttcagcttaaaccctggctcgcgaaaatgtatggttttcacctgcttaagattggcaatctgagcgcagaaatcaataccgaaagctgcgctatctcgcatcaggttagcgtatcgcttaatggctccgcggttcaggtgaaagcggatccgctgcatttgccgtttgcggaaaaatcccccgacagcccatatgcgctcccctctatatggccagtaagcccggatacactcatttaccgatttgctcagggaaccagtattaatctgatatggaacagactgtctgcccgttgtaaagattaaataaacaggtttgcagaaaaaggaaagaaataaaacatggcacgaagaaaaaaagatgacaatgctgcgggtattattctggttattattggcatcattgcctggggcgtttatgttgcagtaagagcattaaaatctacagtatttgtatacaactttgttttgaaagcctctaacatcttaatgacttccgtaacttcatttgaatttgtatgaattgtatagattaaatcccctattccttctttgaggctcaccttatccttcttttttacagtatctactaatgtgtcgtaataattttgaaattgctcatcataatttacaatattacgtgctgttttttgaatgtttggcttcgctgtatctaaccagtaatttgcattgattccacaagaggaagaagaaggcgaaacgaagaaggataagcctaacttccaaacaacaaaactgaaaggttcatttattgaacgagactttgatgatagaccaaaatttacagctgatgccgatgagcctacatttacaaaagccgttggtgataactggtttaaaaaggtatatgaaaaaatagcaacaccaccagcaggaaaataagggggagcaaaagctctctcttttttattaacgaggaggaaaagccatgaaaaatctacagtatttgtatacaactttgttttgaaagcctctaacatcttaatgacgtcagtaacttcatttgaatttgtatgaattgtatcgattaaatcccctattccttctttaaggctcatcttatctttcttttttacagtatctactaatgtgtcgtaataattttggaattgctcatcataatttacaatattacgagctgttttttgaatgtttggcttcgctgtatctaaccagtaatttgcattgattcggcttattactgaaaatccagcagaactgatttttgatgtaatgcctgatagaacctatatggcagttatagatgaagattttgatattgataaatttgtggatatcggacaaggcactttgaaatttatttgtcccatgccgtataagttaggaaatgagcaaacggttgattttgaaaatgacggtcgagggttaattgcaaatgttaaaaacaaaggctctgtgcattcaaatccgattattgaaattgatattaggcttattactgaaaatccagcagaactgatttttgatgtaatgcctgatagaacatatatggcagttatagatgaagattttgatattgataaatttgtagatatcggacaaggcactttgaaatttatttgtccaatgccgtataagttaggaaatgagcaaacggttgattttgaaaatgatggtcgagggttaattgccaatgttaaaaacaaaggctctgtgcattcaaatccgattattgaaattgatattaaaaagacggtcagcgctatctgtgccgaatctggagcctgatgcgcaccgcgttcaaagataacgatttagaggtttacgggatgcgcgttgtcgaaccgcaccacgacggcacgccgcactggcacatgatgctgttttgcaaacccggtcagcgtaaagccatcaacgaaattatgcgtcgttatgccctcaaagaggacggtcatgaaaagggcgcggcaaaacagcgctttgagtcacgtcatcttaatcaggcaaaaactatgttctcggatagatcaggtagagaacaagaactgaatgtaacggtaaatatgacaaacgttttagatggaaaagaattagcgaacggaagttacgcatatacgacaaagcttcaaaatcgtgaccaaaaaagaagagcggaattttaagggtggtgagcaagttggggaaactcggttttacttttaataaaatcagaaaagattatattcaaatgctagttggaagaaaacgcccttcctgggctcttacgctgtttatttctgactaacgcgtaaaacgccgtgttcgcgtcccttcgttttattccatgacgcgtccgtaataccgttttcatccaggcttatcgatatcacaaaaccgttaccatggatctcatagaaattcgcattcagacgtttaacgctggcttttttgccgttcacggtagcgctaaaaaagccgttagaaagcgtggcgttaaccgtatccgacgagaacgaggcttcacgcaggggatcgtgtttccccgacgccgtgccttgagcgtgtgcgtcgactggaaagacagggttttattcagggctatacggctctgctgaacccgcattatctggatgcctcacttctggtatttgttgagattactctgaatcgtggtgcaccagatgtgtttgagcaatttaacgccgctgtacaaaaacttgaagaaattcaagagtgtcatctggtttccggtgattttgactacctgttaaaaacccgtgtgcctgatatgtccggggccgtggtatggatcctgccccaggataaccacctttacatcgctcagttcggtgtagcggaaggcgttaaacacatctttctgcggcggataaattgtctggccggcctgccgttcagccgcaacggtactgagggtatttataaaatagggctgctgcttctcttcagccagcacgtcatgccaggttaaaggtgttgtcatctcgctctcctgcgaatctcattctgtgtctagctgacctgttaaaatttagattaaatttgcaatttgatgctcaaggtaaaattattgccagttatgattgctgcgcagatgtatttcaagctttgttggtgcatcgcttgcaatcacacttttcagcacatatctatgatgtgactaatgcatcatagctttcgtgatattatagtacaccttgtataatattgtaaaaatactttataagtttttctttcacctattcttattttttgctacttgatttcttggttattactttatgatggtgtttatacccctgacgtaataaagagaggtagagctcgtccataaactcgctgaacgttagccctcctccctctacgcgtttgggtttgtttcttctccagttcctggtgtaccaccagccgcatccacagttgcattgataattgcattaattacgtctgaagttgttgataaaaatttacgagcatccacgccgtcccaatattgatctaatgtaaattgttccccgtaaacttttactacatattgagccattagctcagttggtagagcatctgacttttaatcagagggtcgaaggttcgagtccttcatggctcaccattttaatgaaatatgcgggtgtggcggaattggcagacgcactagacttaggatctagcgcctttggcgtgggggttcgactcccttcacccgcacttttaataaaataactcatacatgtcttgcggaagtagttcagtggtagaatacaaccttgccaaggttggggtcgcgggtaggagtaaatggagttacgctctcttcttccgtatgctgattatcaacatcctcttccgatactcccgcctcttctactgcttcaaatgccagcagcagcagtttctctgtggtcacgcttaaattctcattattgtcttccgcatagtggcgaagtctttcttttagcgcttcatcaattttaacgtttaaaaccgcagtaaccatgattgtcacatcctttcggaacacgtgtttaatttaatacacgaactggcagaactgccaaaagagattaaaaagcaccaaaaataggcgttttggcgaaaaggtgagcggttgaaataaaaatgcatttttccgcttgtcattcctcggcggctccctataatgcgcctccatcgacacggcggatgtgaatcacttcacaaacaacccggtcggttgaagagaaaaaatcctgaaaatcagggttgactctgaaagaggaaagcgtaatatacgccacctcgcgacagagcgctgtcagctaactcttgtggtgtcaatttcttggctcgcttgccaggaacataagccgaactcatgctacctttatttccatgccttcggctttcaagtatttttttaattttattaatctgacttccttttatatgcccttcttctaatgctttggtcaaaagagcttgttcatctttatctgccgcttttgatatgtctacagcaaggtacaatgggatatgcccagactcagcagcaataagtaaactaaaagtacataacaaaacattattccaacaatttctaaagtttaagattataatcttgtgtgttagttttttttaatgttttaacctaaatgcgttggttcaaatatttttattaatgatttaataattgttaattaatgaagctttatgaattcatctctcaattaatatcacgcgacttgaccacacaaactttagacttattattgcctggcaaatgcacataattttaacaatggcgtaataatattgaagcgaaatctactgaaaaaaccacaagcttcccgttagataatataagtaggcaccagattgactatttaaaggatacacaagaacagggagcactttgtttctttttaatagaattcagaacggatcaggttatttattttgttcctgtttctgtagtagcagaatactatgaagccatgctgtatgacggaggaagaaagtctattccaagagaggaatttgagaaaagagcgtatatagtacagcgcattctgaacacatatcctaaccgatattggatagtggcagatgtgtagtgctttttagctccagtagcgacaggctggttgtaatactacagtgttcaccagcgtgttttaccatatgggcataaatatctgcatagtgctgcatatctgaagccacaacctgcataacataatcacatatgccagtagtccggtgaaactcaatgacctcaggcatccgggttatctcagcgatcagtttctgtttgcaattgaagcacttaaatctcagggctggttaaatgctgtggtaagtgatgaagagtgggcaacgccagccctccaggaagagtatgccaatattccagccttgctggtgagaaggtcagagctgacgctcaatttttctgaagcgggcgtgctactcaaccccgtagagttcattgccactggcgatgatcatgctatcagtaatgaattcaccagccaggaactccatcacagcattgagtatggaatgggatagttgagtctttatctgaaatatggaattctattgttgaaactactacagaaatatggaattccattgtggagtatttgactggaatatgggatggagtagttgaaacattatcggaagtttggaatagtattagcgaaaccacttccgaagtgtggacagcgattagtgagtttttcgttaatacttggaatggactagttgcctttctaactcctattttacaaggaattgcaggaaagaggggaaaagaaaaggccccggagggcctgaaattatttacgtcccagcagaagtcccagaacgatacctaccgcacccgcagcgattaagcccgttaacgggttatttctgacggattcagtaacatccgagacggcatcactggcctgggcagcatattttttcgctgcacctttcacctggtgtttaggggagtcaacgaattcaccaaactgctgctgcgcagagccggataattgtcaggtcgctttcatgcgcctgaaaatgttcctgcaaataaataacctgatttcttattacgttattatggggacggttttatttggaattgccgtcctgcttatgcgtatgagcattcagaatctgaccaacggcattatttactggtttgttcgggtaatgtcgccctttactgaaaaaatggtcagtcagcctgtctataccatccgttattacgaacataacctgcagtacagcgccaggatgtacatatttattcaagcgttaatgtacatatttaagttagcatttataatctcttatctgttattagttctatgttggttaatatagattcttctgtgtattaagataaacgaaaaaacaacataaaataatagagtttcaaaaaaatagccctccaccagaccatttttggtcagatggagggctatttttttcatgttttgacaagttgcggtgagataagcctgcatttggacagacttacgaagcgttctatgaggaagtaaacggagaatgccaatgaagactcagcgcgtaatcaaagtagcgacgtttctggcgttttgtttacccggtttgacgcttgccgaagattgtcagatcacgctttctcagcccattgtagattataaacagctcaagcgtgacgatattgttacgtctcagcaaagctggcataaattgccggaacgggaagttaccgtgaatgtgttttgtccagacaaaggatcggacatcggcccccctcatattgctgtgaatcctctcagtaaatttgaggggaaataaaaaaggccaccctgaggcagcctgtgttcttcgaattatgttcataaaggtggggatattgggccttccagaacgaccgcttcaccgttatggcatagatcgtagccacgagttagatgccagacgcctctgattatttttcctgtaaccatatcttcagttttaccgtgcgaaaagtagggtccagtggaaccggtagccccggtagccccagtagccccggtagtcccagtggagccagtaagtccagtggaaccagtagctccagtagccccggtaggtccagtggaaccggtagccccggtaggtccagtggaaccggtagctccagtagccccggtagtcccagtggaaccagtagagccagtaagtccagtggaaccggtagccccggtagccccagtagccccggtagtcccagtggactggatttacgatcgccaccgggcaatatgtatgaagcattgagtcctccgttgaagggatactcctctatccgggtaaacagacaatacaggcttgtatttcgctggtcagagggaaaagcagacgatctctatctctctccacacaagtacacgcaacacaagtgaggcatcacctatgacacttcaacaggcactccgcaaacccaccacgccgggcgaggtgttgcagtatgagtatctatcagcaatgtaaagttgcatgtaaggcagagctgccatggttactcccttctccggtttcccggtacgtaatggttattgctcaaaactcgattaaaaaaattgcggcgctacggcgctgatgctcgccagtagtggtcccgccgcgtcagcaggtaacatgttgaacaaagcgattgccgcttcacgaatttctttttcaagcttttgaagggggacgcccagcaacttagcttgatgcgcctctggctgatccagacgctggaatccaccgatgatgtcgttaaggcggatgtgatccgcaagacgctggaaattgtcgtcggttacaccatggacgatctttaacgcctcactcttcccctctcttcggatagcgtgtcatcgtcaattctgacgaacggactgacgatgacacgccctctctcccctaacgccctgttaatcaagcacgccgaatttggcatggatcctgcttagtccgctgtgaaggcgataacattattacgatagaaaaaattaataatggtcttccttatatcactaatactgatgcttttcaacgatggaatgaaaaaggtaaacataaattcggtttttatagtccggaaactgacaatgaaaatatgtctcctgaacgtttgaaaactttaatggaattagaaatgacgaagcgtgtaaatgcgtctgtttcttatgaggtaaaagcggcatccataggacgtgtataagaacctgaagagtttaccgaaggattatttttaaatacagcagtatatgagtacaaattacttaatgataaatgggaagttaaaacttctggttaccaaacatttgataaagagttcgaaaacgaatcttatcttatgaagaagttagaacacttcatagataaacctgaatcgcatttctttaagtatggtaaaagagcaggagaatacggtttaaaattagggaaattagaaatcatagacctggattgaaacggttatcgcctcgctgaatttccgcgacaatgaatttgatgaatttattgaaaccgtgacgttctacgtcatgaatcgcctccgccatcaccgtgaagaacagcaggtggtggatgatattcctcagtggctgcgtagtaccgtggagctgatgcacgacaaaggacagttcagcgataacgccctggagaatatggtggcgctgtcggggaaatcgcaggaatattttcttaggattattacgtcctaggaacagcaacgttcctgctccagtcatgggtttaagctgattaagcaggtcaattgcctggcttgataacggaaccagatggggtcggcgctttttcattcgctctgccggcacgttccaacccttccgctcaaaatcaaattcctgccactccgcttgcctcaactccccaggccttactcctgtcagaataagtaattgcatcgcaatcttaacatgtgttgaataagtttgttccccgattttatgtgtttcaatcgttccaatctctaataccttttcaattgcttctcttgtcatagtcatttttatttccccttttcttaattagatttacttttcatataatcgattactactgtttgcttctcagcagcctgattttgttctttttcttctacttcttctacttcttctacaggttgtccaacatctgttttcacatcaccctgtagataatgcagcttgtgcctgaaccacaccagctgacactgggttgttggccgcatcccagttctgaccttgggtatacgctacacggtagtaaagtgcgcctgcgcctgtggtatcaatcgttgctttctgggtattgttggtctgatccagtttgatctgatcggtagcggagttgccatcgtttgacagtaccagattgacgtttttagcggcgccttgagtgtttgatggtggaaccagccacgatcatacattaacatctgcttatcaataacaagcaaatcaacatcactgaaacccttgatatgaatatctaaagcaacagagccttgcagacgaaagtcaagattatattcactcagtcttttttcaagctggttttcaatccgctttgcggtattaagtgatacctcagtatattgagtttcgacagattgcatagcacctatgacgtaacgtgtcgcgttatctcccctgccacttataatgcctgatttagcaatttgaacccaagctcctgaagcatatgtggtaatagatcgtttggctgaattcttctctgtttccgtaataacatatggtacgattcttccatcacgtacttcttttagaacaagattttgttgttgtaatgtagctgaatgtgtagttccatcaaaaacagtgaaatccaacatatcaacattgtttttcagttcccaatgccttttgtcatcccaatcatcgcgcgtaaaaccgacaacaatttcaagcgtatttcgaatgacatcgcaggcttcgggctcctcggtaatttcgagggcgtgaatcagttgcaggataatctctttattagagagattgtcaccggtcagcataatacagcgtattgccgagcccaacacttcaacctcaccactgagatgttttcctgcattaagaaaatgttccgccagtcctttatcgtgcaaggcttcaaaaaactccaaactaccattcaacactttagaaacaccgatactttcaccattaccgatatctaattcaataatagggggttctgtccacgtcccactctttttatgaaactttccgtttatacccttcaaaactctctgaaatgtcgttacttgttcgtcttgagataattttttacattccattaacaacttcagaataagaatggattcaatttcgtcaaagtgacaaatgatcttgtttaaaaaaacaaacgattcttcctcgacagcttgttgaaagaatcgtttgtttttttatagatcttgttgaaaatttcattatatacctataaagacagcaaaaggtcatgtaatggaagttaattccagtctatgacctatttttacacgtatctcggctgaaccccttttcgatacgacaataacttgtttgccataccattttgctttgtattctaacatggatcgaaattgcgacctcatggaatttttcattttccatggtaatgctgacaatatactgttgcgatctgacattcaccttttctgcccaggacctgaaacggacgtcaaaggtttgtctgtcattcatcaggatacgtgaatacagtaatgaacattccgtcagcggcattcccagggtaagaagaaaactcatgatgttattacagagcgacgttatacaggcataatcactgtcagacgggaattccccctccataatcccttgcgttgtgaccgccattactaccctctttcatcgtaaacttatcgaaagagaataaatcaatattttcttttatttgcttttgcaaagctgataatatttctcttttgtttctatcgcattttcttttttgttgtaatcgattttcttttttagctttctttagttctgatatctttggtatctttagtaattctctagccgtctttttacgattatcaaaggtttaatatgttctgccagtttttccaactcatccttgtccattggcgggttacctctcgcctgtcgactgtcctgcatcacgtagagtaataaatctggcttcagatttctggcttgtcgatctccctgtacataagcaacatagccgtaattgagtccaccgtctttgtagacagatttcacaaatgtaccaacccccttacgtccatccatttctattgaacgccactttggttttatcagcatattcccggttaatccattaaattacacatgccgcttatttcggggccagtgcactcatttcgtcgcgtaattcctgagacagcgccgggtctttgagaattttctcgagttcttttctgaaagtggcgttatcaagaagattggatttgaggtcgcgtaataaattacgcatggccagcatggcgcggagctgggggatctggcgggcaacctgttcaggttcgcaatccttatagtaaaaagagaattaattgcaattgaatttcgtacgatcatagttaacggaacgaggcataacaacgttatgtatgtggaaccaattgtgaagaacatcgaaaaaatttctattttatatcaagaacctatcacatcagaaagtgacaccctcccacattctaatgagagaggctcccacactaaaacggaggaggctcctacattgaaacgtgggacaaatacaaagattactacaccgtctgtttttaagacatcagccaaaatccccctttctctttttgaaagttcgcctgcatatctacctttaaaagcttttctctctcttctttctgcgttaataaatttattgatttctttttttgtcaaacttttattaccatcaaaaactttttcgactaaagaggcgtcgcctttgtatttaaataacatttcttctaatcgtactttatcgaattccccgtttttacgtttaagctgaaaaactcaaagctgaggcaatcaattactttcttattaaagagatcacaccatggcgaaaggataatatcgacgctatctctgaaactgacaggaaacgagctgaggatgctttaagcgttatttgcacgaaacttgggcctgtagtgtcttcttatcctgaatggcatccagttatagcgcttggccgtgataagtcgataccctgttacagggacacgcagacgacgcatacatatcttgaaccgaaatatcctgttagtccgtttcatgctaaagtatggtttatctattcaggacattatttcgctatccatgaacgatttaaaacttagtgaaggtattattaccccaggacaaacaagtgcgtttaaacgcaccgtaaagctatctaaaaaagatagagaattagtcctagactatttaaatgacattcctgaaacgatacggccaaaacaacatagtaacgatcagaatgtggaaagaaggcaaaagaagcttcaccttggtcaaagttggttataccatcaagagaagaaataatgaagcgtagaaagctaacttatatagcaaattagtttgaattcataaatctttaattaaggagagatagggaatgaatttccaaattgatgaaaagaatgtagctgctggtcaatgggttgtatgcgaattgaaggataacaaagttattacacaagtgaagcgcccgtagctcaattggatagagcgtttgactacggatcaagaggttaggggttcgactcctctcgggcgcgcttttattaacgggaagtggctcagcttggtagagcacctggtttgggaccagggggtcgcaggttcaaatcctgtcttcccgaccacgcgggtgtagtttagtggtaaaacaagagccttccaagctctggtcgagagttcgattctcttcacccgcttttatattattccgcagtagctcagtggtagagctatcggctgttaaccgatcggtcgtaggttcgagtcctacctgcggagccattatgcttccatagctcagctggtagagcacttccatggtaaggaagaggtcaccggttcaagcccggttggaagcttgggaataggtttaaaacttttttggcccgttggtcaagtggttaagacaccgccctttcacggcggtaacacgggtcttttcttttcgctcatccataaggaggtatggcagaacgaattccaccatccgtattttttgttccagttcggtttcagactttgtcgtgaaaccaatcccgtaaacggactggccggtataaatattcccgtaggctgtcaggcgcaggccgggaaccgtaccgacccacttatccctgtatgccctcatggcggaggaggcgtcctcactcatcccaaatattcccggccagctgaacgtaagttcggtgccacaggtaatagcccgtcagcacgcctgcggtgacgaggcccgtcacgatgatatacagcatctgccgaaaacgagtcatgctagctatccttcaggaaataatcagatatacagcggttcggttctttcattggccggtcgcagcgaataaccgacgcacgaggaagcagagcgtaccagctgatgtaaacccagggatattgcgcgcattcagcgtaaaaggtacaaaagagactaaaatcacacacacagcaataattactcccataaccaaagcggcaggtactccaaccgctgccacaacagcacccacaatttttaatatacctgcttttagcattttggcagcagctttcgctgccgcccttcctgcttttcctgccaattttgccattttcccgcgcgcttgcatcccttttttcttaataaagtgggaagctacatcttttagcatttcattttttaacttatctatttttcctgttccctctgaattaaggacactctgtgtttttgccacatcagtatcaagatttttcaacttcttatctacctgtagttttagatctgttaactcattaatttgacgttgcacactttcttggtttgtgatggtcatgtcttgaaggacttccagtctatctgtaaacccttctttatcttccttattatctacaaatcctttcacagtaatgtgaaaaggcgttgggcgcttaccctacgacgatgtagaacgtgtacaccgtatgcacaaactattaaaagtacaggtagaaaaattatatgattttgttcaaagtggtgttgcttcacgtgatcaaaaaaacgaatataagattataaaaggtatcgatgaatggttcggtgcgacacgtttctctataaatagttaataactatgaaatgagaagactatcttcacagtaatgtgaaaaggcgttgggcgcttaccctacgacgatgtagaacgtgttcaccgtatgcataaactattaaaggtacaggtcgaaaagttatatgattttgttcaaaccggagctgcttcacgtgaccaaaaaaacgaatataagattataaaaggaattgacgagtggtttggtgcgacacgtttctctataaatagttaataactatgaaatgagaagactatctcattttgcatgaaaagaatcattgatttttgtaaatctgctactgttaatttagtcgttaagtcatataatttctgattttgtttctctaaatcatttaaatatgcacgttgctctgctgttagtttattaatttcagcaaaagtattatatgtttttttaattttttcaggatcaattactttcataagatcatactctttcgtttttgtaactgcagctgcagcgatttcacttttgtgagcctgacaaaaagttgctcaaaggttggctaccagattattttgttactttatcgaagtgatggaatagtccagccacggactattccatcactcacagttataaaaaataaggataatattggccccactatatatttaaatatcctatctctttttttaacccctatcacatacagataatcgataaacctgggaccaaacagttattcctttcagaaaatcaatgatgatattagtaacgccttcgctcagttctgagtaggtttcaatgtcgtcatttggatcaaatgtcgctttgtctttacctgaccaagcagcgccaccagcctgagtgatcatgttctgggatttgatattccagtccagttcgtagcgttcgatcccttctccttcaatgatatttttcccggtagtaactgcctggacagccagccattcaatacgcgcccggatagcagtttgctgtccttgaactagtgtctcccgttggaccagtagctcctgttagtccagttggtcccgttactccggttggtcctgtatctccggttagtcccgtatctccgattggtcccgttactccggttggtcctgttactccggttggtcctgttactccgatcggtcctgttagtccggttggtcctgttactccggttagtcccgttactcctgttggtcccgtatctttatcatgaactttcacttcttacaccccttttgtttttctaaatacagtgtataacactatcgcaaaacacaatatatagtatgacgtgacacattgtgacaataaaacacaaataaaaaaagaccaacctaaaaggtcagtccgaaaattaaatgatgtttttctttctattactatttgatatttcattatgtaaaatagttaaaatgtccatgattgcatcttcgcttaagcaatgcaagtattaagtaaagctactggtggaaaagaagtttttataggtactaagcgttctccacaatcaagagtgaaattcgctcaattcattcaagataatatagatcaattagaagaaataaattatcttgataacaaagaaattgtggttatttggaaaataagtagaaaaataggttttctatcaaattgtattgtagatgatatacataaaaaaaatcctgtaaagtctggtgctatgcagaactgattggcagaccccgtaactatcatgattaccacttcgaggcgaataaacgctgcctcgaaatcatcctgtcaacattccatatagaaaatgtctaatctttgactcgatattcaggacaaattcatgcgtacgcgtagcttttttttttttagatgatcggtgactttgtcggtttccctgccctgtcaatatcatctccaccataaagacaaccccactgccgctcaggaagcgaccactacagttgaaaccaccgtcgagagtgtcccacttgaaaaccgcactccagcagtacgttttgccgttcacctgaccagcgacaagtatcaatcacacatcacaaaagagcagcaactggctgccagcgaaatgtcactggatgaaggcaacacctatcttcagaacctgctgctggcgaagagcaacatccctgaagttgaacaagttcattgaagaaaaaacaatctgctaatccacgagatgcggcccaatttactgcttaggagaagatcatgggtttgttcgataaactgaaatctctggtttctgatgacaagaaagactccggaactattgagattgttgctccgctctccggcgagatcgtcaacatcgaagacgtgccggatgtagtgtttgctgagaaaatcgttggtgatggcattgctataggtagccgtatcggaaggtgcggctggatcacctcctttctatggagaattgatgaacgctgttcatcaataaagtttccgtgtttcgttttgttcagttttgagagaactatctctcatatataaatgtatgttctttgaaaactagataacagtgtagctcatattttttaatttttagtttggttaagttagaaagggcgcacggtggatgccttgacactaggagtcgcatcactggcaacctgttttttcaactgttattgtggtgggattatacggtgtcatcgccgttcggaatgaacaggagctgtaagcatgtttactggtattgtgcagggcactgccaaagtggtgtccattgatgaaaaaccgaatttccgcactcacgtggttgagctgcctgaatatatgctcgacggcattgaaaccggggcgtcgatagcgcataacggctgctttctgcgttatgatttcgcgacatcaaattcaagcactatcccctcttcgtcattccagccgagcgtcagggagtccggtttctgtttcgcggccatgtgggtcagcagttgctgactcagcaccggcaggatttgctggttgagcaggctgtcaacattcctcgcaccagtatccggcagcaggcaggcggcggtcagcgcgtcatacaggctctcttcaatatgcgtcactttactatttccaatatccgcttttaagttaaacatcatactcataaaacacatctccttttgtttactattccattactatatgaatattttccaaaaccttattggttataaaaagattactttttgataccttattgtaattgtaacacgatcctttgggtgatgcaacaaaaaatgcaataaaatcaccaaaagattaccaggggattactttttgatacctttgccggtacctgtaagtgtgtttccgctgatggcgatagtgccagtagtataaatcatgttttctccaggcaataaaaaaccccgccggagcggggtttgttttgagacagaatgagttattggcaggtggtgctggtgaatgtgttggcgctcacccaggtccagttaaagggataaccggcgcggtactgtgtctgattgttttgtttacggactccgtagatctggacgaaatttcataatacctatagtggagcgcctcaaggtggaatcattagtccaatactttctaatatttatctaaatgaattagatgtttatatgaaaaagtatcaggatagatttgaatcagggaaaaagcgacaaattaataaagagtatagtaatttacagtataaagtacgaaagattcaagagaaaatcgatactgcctatctaaatggagaagtaacacgaattagaaatttcataatacctatagtggagcgcctcaaggtggaatcattagtccaataatttcttatatttatctaaatgaattagatacttatatgaaaaagtatcaggatagatttgaatcagggaaaaagcgacaaataaataaagagtatagtaatttacagtataaagtgcggaagattcaagagaaaatcgatactgcctatctaaatggagaagtaacacgaattaaagattcatcaccggcaattacacgtgcttccaggtataacttaggtgtgaagcccgtatctttaattcggatcgtatcgccctcgttaatgagttcatgtgctagtccgaaaatacgtccaatcgattgtgcctctacttcatacgaaacggaagaattgacacgcttttttaattctatttccattaacgtcattaaacgttgtggcgtcatatttaactcttctgttgaatggagaaaaccttcgacctgatcgtctactggccggttattaaatcgcgactgcgtacggttaaaaagacgcaccggataatccggtgatgagacgggataaatcgttcggacattttctcccagaacaaaccagtgacgacatatccgccacgccatatccggttcgggttcatcgcccatttttaattttaaaatagcatcaacggtttcttgatcgagtatttgagttactggattattccgcagggcaccggaggaaacgtggctccgaactgtgtcagattcacaaccgcgcaaacaggatatatcgcaccggaaggagaacagcgctataacatggttattcccggtaattactttgaagcagaggtcagtgccgatgctgccggaattattgcgaccctgatgatcatgaactggttgtcctggcaggttgcagatatggggcctgaacctgtcgatagcttgtgggaattattggatgttatgggatacatctgaaaggatagataaaaaagcgaatccctgagtttggaatgggaatcagggttcgctttatgtgttactaattgtaactttttgcggaaattaataccccgatgggagtattaaaacaattcgagggagataagtttatccagatgcttattaaaggccgcgtcgtccatttcaggcatatttagtgggatcaattaagtacaattggtagcccgttcgtagcaacttttgcgaaggttggtattacggcagcagctggccttattaacttcgttgttattacagcagcaatgtctggttgtaatagtggtatttatagtgctggacgtatgctgtatacgttaggtgtaaatggacaagcaccgaaatatttcacgaaactttctggaaatggtgtgcctttatttggtactcaacggatttatctatccagtccttgacatcttctctacgccagagaaggcgtttattacctggaagacggcaccttggtggcagacattttggatttcgcgttgcatcactgcgtatactttttacggttttctttaatgcaaaagccaactcttcaacggttataagttctggcataactgatttcatcgaagaacctatctctcagtaaaaattagaggatttttctgtagtcataattcacgaaagcattaggataatcttttaagatgtattcatgcttcctgttaaactccgcctttgtttccattggctttttaagtaactttaaatcacgctcttcatatttcctggcaacttcaataccgaaatttatactatcagcaactctttctttatacgcagagaaatcaaccggagttttctcttcagaggaaacatccaactcataattctacctgggtcgccgccaggccaatgccttcttcagcgtacatggtatcgaacatatcatcgacgatacgctgaatttctgcattcacttctttaaccggttccgcgacgatgcgaagacgctcgtcaggaatatgtaacacttgcaaaactgccataaatttccagagtcgtgttcaggagttgataagaatattacttctattctagacaaatccccggtcgattgatgttccagagtcttcgaaaaaatcagtggaagaagcgattaggggcgttagtacgtatggtattgatgctgaagaggcattagaaggagttcgccgacagtgggcattaaataaagatgcttctgacgaaacaaatgccgctatagttaaaggagcagcgactattgcagcctcctacgctggaattgattttaatgaacttatacaagaaaccaatgagattggtgttgatggattgaagcttgaccgcgatatagttgagcactttgttgctaacgacaatgactatagcattattaaagcgatacagatatatagcgacatgacgggaagggaatgcgttgcggaaggcgtcgatagcgaagaaaaatttgaaaaacttgtcgcgttaggtgttaaacgctttcagggatattatctttcccgggcggttaaagaagaagagcttgatcgaaggtttcgacaccatggccagcagaatacccagtaccaacccgatcagaatttgttttacaagactgccctgcgccaggcgcgcgaacagaccgcgtgattgtgtgctcatacgttattcctgagtgaaattgcgttccatcctggatgtgctctaagtcacatttatttccggatgtaagtaaatgtttgcctggtcgagtatagggaatacgtgaaaggagggaagcgttctaacaccattcttgctgtttcttggattatcctatctatcatggctgggattcctagagggcgctttttaccattgcccttgtcaatgtaatgccttcgaacgggtttaggtttgtagttgtctatgtgtccccagatgagtttgataagctgttccgtttccatttgtaggtagtagttcacgtctttcttgtcaattccgaccgttttactcccacgattgcgttctaacaccattcttgctgtttcttggattatcctatctatcatggctgggatccctaaaggacgctttttaccattgcccttgtcaatataataccttcgaacgggtttaggtttgtagttgtctatgtgttcccaaatgagtttgataagctgttccgtttccatttgcaggtagtagttcacgtctttcttgtcaattccgaccgttttactcccacgattgcctttctcctgctacgcttgttgtatggttcagaaacgcaggaacgctttcgatgaaaaaaatcgccattatcggctcaggcccaacagggatttacaccttttactcacttcttaacaacgcagcgccgctttcgatcaccgttttcgaaaaggcagaccaacccggtgtcggaatgccctacagcgacgaggataattcccggctgatgctggcgaacatcgccagaggttattaaccttatcgccttcctccccgctgaaagtactttacaacccgaaggccttcttcatacacgcggcatggctgcatcaggcttgcgcccattgtgcaatattccccactgctgcctcccgtaggagtctggaccgtgtctcagttccagtgtggctggtcatcctctcagaccagctagggatcgtcgcctaggtgagccgttaccccacctactagctctttgccggtatattcacgctgactcagcccgtcgcccttgtctgtgaccttatacagcttgtgttttgggaaagccgacagcggagcaagcccgatatacagcgtgtaaaagtcgaggctgttggccttcttttcaggatcgggggggcgggtggatttgcctagcacaaaggtactggaatattgcagcggcttattcatgtacgtggacgtcaggtaatcctgacaagcagctgtggccaaacaccaaaatggcgatcggcccggttatcgacaacggtttctactacgacgttgaccttgaccacaccctgacccaggaagatatcgacgcgctcgaaaaacgtatgcacgagctcgccgaaaccaactatgacgtcattaagaagaaagtcagctggcacgaagcgcgtgaaaccttcgtgaagcgcggcgagagctacaaagtctcgcattttttaagtgttcatatctatttttcatgaatttcctcctctcgttaaagattatagaatattcagaactacaataaaaggttgtaataaaaaaagacgtggtatttgaccacgtctttttttatgtgtgccaggcatggcaactatctaggtggtggaagtccactgtgggggtacacatcgaccaaccactaaggaagcgcaaggtacttaccgtgaggtagccgaaccacataaccacaaaatggtaataaagatgttaccacatgtcacatatgaaagaaatttgtacgattgttgactataccgtttaacgctaatatacgtcattaataaaaataaaggatatactccgtaaaccactctaaagcctaaatatggcacgattgaaactattgagcatatagcaactatgttaataataacatttaatgtaaggacatcttttcgcgccattgaaggactgaaatgcgaaaccggggtacatatctgttacgggtacggcatcaaagccaatacggactggaaaaagacgctcggctccgagtggcgccagtatgaagaggcgtttccaaagttgcagacctcaaagatcgatattatctcgctggagtgccacaactcgcgcgtgccgatggatctgctggagcttatccgtggtaaaaaagtgatggtccttccggtggtgcggaacagttgcccaccaatatcaaactgcagccgggtaatgtctgattcatgcaacgggagaaactgggccagatagttacggcgaatgagcatataaacacgtcgctcagcttcactcagcgcagacaactgaaacgcatttcgcgtggggataataccgtggtgtgcagtaatttttttatcgtcccagatacgcgaaacaaatgagagtaataagcgttaaagaataaataaagatgaatgacccaagggtcactgacggttacagattacacatcaggtttttccagtgaacgaatcaccaggaagtcctgagagatgccaacatcatttccagttgcttgtctgttatgaataaaccaggcatacatatctgagggcgcattatcttcggggaaaggctgaggctgaccaagataagcagcatgggcatagttgatgtgccaaataagattagtgcatacaataatctcccaatctgtaaattactatgcacaacgacaaccacagacgttaaaaaaattcaaatggcgtttagatcaaaaacagccgtctcacaaaactaagtatgagttgatatttgaaaaattttcaccagctttgttgcaaatgtatacccttgaaaaccctttaggtatagtgaatggttttaactatatgagattcttttcgtatggtttcaattgttttttcattctctttcaccagtttgtttagctgatccagcatctcttgtttattacctaacgaactaagaatttgattataaatctttcggaattcttcgttaggatctacaatttctcgataatctccaaatacatatttatcttgtgtaggatcagtaaaagattcgtctccagctattgctcttgcttctaaatggcttcttttaatccattccagacagaagatgcggttgacttgataccttcccagatgtttgaaagtgtagatttaataccattccaaatgctactacttgtgctactaatcatgttccaaaccgttgaaatcgcttctttgatgctattgaatacagaactcgctgtggaaacaattgcgttccataagctagatagatagcttttaatcgtattccatactgtggcgcagttcgtcggagttgaactgggcgagtagctgcttgcgaaagggcatgcgaacgactggataacgtgtggtctcgtcatcattctcgtcaatctggataccgttatcaggttcaagaccctgacctgctataacgccagtgtcgctggtgctttcagatttcagaaggggaaatttgccgctgcgccaggcttccactatttggttgcgatcgctggcaaagtaatgaaagatgatgtcgttcaaaagatgaaagaaacttggtcaggtataacaaaatggtgggaagaaacaaaaacttccgcaagcaacaaggtagaagagataaaaaatacagtttcaaggaaatttgaagaaaagaaaaaagctgtcgttgataaaatgaaagaaataaagagcgatattgaagataagtggaatacagttgaaaaattcttcagcactacttgtgaatttacagggtcagaaacttgaatttgcatcattgctagatagttatctaattcatttttcgcgtttttcgcttcttcaattttcgcttttgcatcttcatatttaccgctgttattaaactcttccgctttcgctttcaaatctgcaactttttggcgtaactcttgttcacgtttatccattccgtatttcctcctttttttggcacaaaaaatagttcatttgcttacctcaatttaaaagattattgatagtgaacatttagactgttaacagatgaagatagatagaaaaccatacatttatttatccaatattctatccataataattcttagctcatatctagttaattctattttctcaagcaacgtttttatcagtgtgggtgaaaaattaaccgtgcgagggtcattagcgagccacaatttgagtaacccaacagttagacttgtttcaaccgttcggtcatatgaacgttttccaacttggtttttcagctcttttggttctaaattacttgtatataaagtaggaagttcttttctataacgaccatcaataatattgaacaatttttcttctacccattccgtagttttttccgctccgatatcatctaatataagtaagtcgcattctaaaagagctctcataatctgcgtctcttaccgagattaaagacgtgctggcttcacgtggtctgtctctgggcatgcgcctggaaaactggccaccggcaagcattgctgacgagtaaccggatcacaggttaaggttttactgagaaggataaggtcatgcgccatcgtaagagtggtcgtcaactgaaccgcaacagcagccatcgccaggctatgttccgcaacatggcaggttcactggttcgttgattttctccctttccgataatgggcgattctcttttccattactgaaatcaccgacggtgaggagtttaagtggcagttcgattttcttttgcgcgccacctgtatgcagagccagctttaagtttatgcgtgccttgggcacctcattctggaatgaatcggccatagcaatccctttctttaaaagaaataaatgttaagtgagtgacgtttctttaggcaaatgcagtacgggggatatatgacctggtttattgaccggcgtcttaacggcaaaaacaagagcacggtgaatcgccagcgcttcttgcgccgttataaagcgcaaattaaacagtcgatctccgaggccatcaacaaacgctcggtgaccgacgtcgacagcggcgaatccgtctccatccccaacgatgacatcagcgaaccgatgtttcatcagggacctgtggcgctataccgatgccattcgcaaagtgtttggacaggaaaagcgtcacgaactcgctttggttctccgtttcaccagaatctgggcggcgactgattacattgaccgcggcctgctggtaaaagaatgggccaaaggcaatcgcattgcagaaatacagcgtactgaaagcggtacgaatgctggcggaggcaacaagaccgacagaaaccctgagccactcggcgctgtccgggtgcgtgtagttgaggtgcagccagcatggatgttcgttgtcgatatgatcctgatcttcaagcggccttgcgccgccacgtccatcaaacacccatgcaaaaactgcgtcaggtacgttaacctcagacccttcgatgctctccacagcgcctccaccgttttatctctttcggtgtcagtctagctttcgccgagggttccgtctggtttgtgttaattagcttcctggcaggacgtatgctgggtccttcaacagcttatattaaccacgacgttgcaactgctatttgcggcttcatctatggtgatattaatgcggagacaatgtacgaaacatatacaaatattgatattttgattctgttaacatctgcaacgatcgtctgtctcataacattgaagatattcaacaaaaccaggacatggggagagttctctaatgggatttgcatcacctgctaccgattacgtcgaacgccaactttctccatccgttctgtgcaacataggggccgaaagcagggtgcttgaaacagatgttgggtttgcagtcattgagccagccacgaaaaaaaggccaggagatgtgttgttaattttgtgcgacggccacacacaatttgcaatctcatgggcatggcggagagaatgatttgcatgttcactttttgcccggggataaggtgttgctgggctggagtgataatgcctggtcgccttatgaaaaacgtcctgatattccagataagactgtaaagcaggggcaaaattgatggatatcgaaagtattattgctgctgccagtcgtgcacagcaggctgatgatgccgggttgggaaattgttcgcgtgtttggcatgtccatggcggttgtggcgaagtggttaacgcaccggattgtggctccggcattcgtgggttcgattcccatcagtcgccccatttttattttaaaaattacaaataatctaatggatacttacatataattaagtaagaattcgatgggctatagccaagcggtaaggcaacggactttgactccgtcatgcgctggttcgaatccagctagcccagccattatgaggatgattgctaccgacaaattagagatcatggcccgccacgtttgctggtaatcgatttttggctctcttccggaacggccctgaaattactcaaagaagtaaaacaactttacccacaggtacgactcctggtggtcagcggggatgacaataatgatatctggcgcaaagttaatgccgccgggggacacggttttgtattgaaaagcgagccaatttgcttggtatgcacacgtgacaaagtaaaaattgattctaagattgcggtagtaaaaattatcacatggaggttccaatggttttcattgtggctttaactttatctcttcttctttgcgtagcgggccttatcttcattttgctggagctagttagcataggctgcaaccctcaacgacattgaacgatacgtgcaagaaatccagcaaaagcatctgcaccagatccagctcaatgtggtgggcctcacaaagctctttaatttcttctgcggccatagttgaggtggcaacagcgccgccacaagcgacgataattttacgtttcatagggtacaccttcttattatcagtatgttatgaagcctgagcacaggcctcaggctcaaggatcgccgtccggaaacgatccgccagatgctcagctggggtcgcttatacaatcgcattctttaaaattcccggtggaagtaagtattcgtggtcatcatatggagaatgtgagtgttctaaaaggattgcaaaatagcgagcgggaattaaatgaccaacgtcaccaggcggcacttggtggaacagtagaccggactgtagatcgtaaggcggccggagttaaactgatgcaagacgttttccagaccacgggtgcaccagggagcctagcctttaattcaactgcatagtaatccctattctggtagggattttcggtcagcagctccgttaaaatattcctggccttgatacgcccatcgtatgcggctttgtcttctgagatcccgtcaacttgatttaatttatggttgtgtattgccttagaactaattttttctgacagtaggcagtagttaaaatttataaggttatcactgactttctgagcgtattcaggattaatggtttcgtcagaatgtacataagagtatagaactatacctacgttttctttagttatttgatagaggttattttcagcaatgaaacttatagctgaaaattcattaggtgtttttggagtgaataattcattgtaacatacgttaacttttaggatgttggtaagaaatgcaggtaaatcatcatctttgatgtggaacaaacatgccgacaccttaaatgtttatcgcggtcaactgatgcaaagaaaggtaaattcttgtgatagtgattatcattacggcaacaagaaaaacaagcgaaatgtgttgcgttttgatgaccagatgtaaacgcattgcggagtaataattgcttgagtaaccgttgcgtttataaggtataacgaaaatgcccatttacggttaaccggggtatgtcgcatttaaaatgcaagttagtgctcacttgccccccttcaacccacggagtaatctcaaggatgcgattaacgacgaagttctcagcttttattaccttgctgacggggctgaccatatttgtcacgctaatcggctgctcgctgagcttttacaatgccatccaggataagctggttaaccgggttgaatcggttgcatcggttatcgaccctgattctgacaatgtgttaatgttttattcgaatacaaagaatctgagatgtcctgatggaatgccgaatcgattgtggggcctgttgcatcgctccttcaatatccagccctatccctggtatgccgcaagggaaaccagcaaatgtaaggtgtgttcagctatctaatgataatttatgtaacatttttggatcccatcttcgtcctaaagtaacgtcattcgtttgttgtccgacaacaagcctgtctttcagaaacgcctgatgtatccgatagatgatgtccgccatctgctcttggcccgccatttgcgtctctgtcgatacagggggcgtttccggctggcgattcataatcgaaccaaaagcagcatattcattgcgggtaagtttcattgcatcagctcccgttgcactgtgacagtgtatacgtccaggttctcaatcgacgtgcgggagataatattttctggtgcagaaagatcagccgtctgcatcaacagttcgtaaagaccacagggggcttcgtaaaccaaaggaaagatactgctggcagttggctgcgcgtggtcaccatcgagcaggagggtttttatccctgcatcggccaggaaaccggcaagattggctgactgagtagacttacatacaaccttgccaaggttggggtcgcgggttcgaatcccgtcttccgctccaattttcaatatgacatgccggggtggcggaacaggcagacgcacaggacttaaaatcctgcggtgggtgaccaccgtgcgggttcgacccccgccctcggcaccatatgcgcccgtagctcaattggatagagcgtttgactacggatcaagaggttaggggttcgttgaactgatagagatcaagccaggccgggaagctggccagtgtccccaccatcagtaacgccgaaccggcaaaggccagggcaatgggaacaagatataatcgccttttgtcgcaccagtatttcattgccataaaacaggcaataaacagatggaacaccagaagaaatatcgtcagcgtagggaaaaacaaaggtgaaaacgaaggaacttggcaaagggagtcctgctattgacctggctcccctcataaggggaatggggacaaaacaagaatttatagaccttgcagaacgctattgccagctatcctcccatcaaaatatcagggagctggccagagaaattgcagttgtcaaagcctggattgtcacggaagtgattgtcctgcttcatatgcggcgaaagagtacttttcccttgtatggatcacgggtctacgttagaacaccagccattaaagggtggtatttcaaggacggctccacgcagactggcgtccacgcttcaaagcctcccacctatcctacacatcaaggaccagtgttcagtgtcaagctatagtaaaggttcacggggtctttccgtcttgccgcgggtacactgcatcttcacagcgagttcaatttcactgagtctcggaaattcaccttatttaaaaataccttcggcgtgtcgttgagggaatgatagtccggccccaaatgaacgtcaataacgatcagtaatgcttaattgatcgttataatctatttaacgagttgtgtagtgcgttgcggcaggtgatcatgttaaagcaatcgacctataaccgaatgatattaaatgattttaattcaattaatccgtaaccgtaatgtttcttcttctaattctgttaaagaaggactatacccatgtttgatttgaaaattttcaatagcattaaaaatagttttttctgtatcgttcatcatactttattcccctctactatgatttttttaattaactataaaaaacggtatctttttcaactggactttccctctctcttataagttcaataccttctgtttctgcaaacccatctgactgaaattcgcgatctgttaaaagagcagaataaccgcgtttaatcaggcgacagaaacagaaaggccagtggtaaaaaagcgattagcttgcttgccactggcctcccagttaccccgttgtgcatgtttacctttacgtaaataactcccttttcctttcttgttcttctcaactcgctgtctgaaaagtgggtcgtgaagcaatgccagcccgacgacaatataaaagaacctgaggattttcctataattgtgcggagaaatagttttaaagcgaatactccacaccatgccaataatgataacgatataaacaaacagcatggtggaggtgacatatttgctggcgtccagcgactgaccaaagatgtagttaaacgccgtcagaccaaacccgatgcccagcgcaatcatcagctttcagaaaccggcagatcagtgagcaacataacagaagagaacgccaaggtaaatcttggcgctctcaataaattaaatcgttctaaaaaattcttaataatgaaattcgaaataatttgtaaaaaacacatcacttttcaataatctgattaagattttcaattccggtaatctgtttaaataccgaaaggtaatcaggatgattatcatataaatggtcatcgtcttctttgtaacgtctgctgattcaggagcaatggttgtggatactctggcatcaggtggggtagcaaacacaccggtctggcagcgaattttctgggcctcgctcatgggaattgttgctattgcacttctccttgcgggagggctaagcgcgttgcaaacggtgacaatagcaagtgcattacccttctccgctatcttatgttcgctttgcagcttctccagtagctggataattgccgggagccgaggcttaattctgctcagcgctatatgaagatttggttcaaagataggcgtaagaaatttcaggcggtcttgtatatgggtgttaatgagtttcagctcagcgtccatagcagcgataaggataactaagtctttaccgtcctgccctagcgaatcagagatctgctgctgataaaggcacaatcccgaaatccatcattagatgcatctagcacctacgataccttggcacctaaatgcatcaataatgagaatatgcaggagtatttcagagcattaaagtttgcattgtccaaaaaagaagttaaaaatattgccatcacgggtaactatggcgcaggaaaaagtacggttatatcctcatttatgaaatatcactatgacgtgaccggaatgctgaaacggtatggctacgacacttcaggttcgggaagtgacgccggttatgctcagttaatccgtgcattccagctgcattttcgtccctgtaattacagcggtaagctggatactgaaactgccgcgatcctttatgctcttgtggaaaaatacaaatagggagatacagattatgaataaatttattacggggcgcaggctcacttcaccttttgccagacgctcctggtaaaccggatcgtctttcagctcggcaccgaggaagttacacagcacggcagtgatcattaccgcaatcagcgtgaccggaatacagattgccagcagcgtcaggtaacttacgcccattggctcaaggatgcccgcgaagaagaccaccgccgcggaaataggcgaggcggtaacccattaataacctttattacgataaattcaggcacaaaatcactacctcgttagagtaagcgatcacagcgacattccccggtggaacgaaatcttcttctgtgcgcccttcaaaacgaagcgcggggggagtacattgttccgtgcacacttccacggcaggaagttgcaataatagcgaaaaggttaaaggttcatgtcccctatcgacttagcactaactaggataaaacatcctatcaacaataagactgcagctactgttgaggtcttaacatcaccattcataataataaagcatgaagaattcgattggatgggtgaaaaagaagatagtggttacgtaatttattataatcaaccagggaatagtgaagatgagttcatctatttccttgacatgctttctaattatcaaatacgctggaaaaattgcaggggattacgcacacaacgctgcgcctgtggcctgaacttcttaaactctgacgcaaaaaaaagctcctcagcctgagcgcatgaggagctaagttcagagaacaacttttttacactttgttattcagtatcagctgaccattgctgtcgagagggatctgcgtaccaggatctttatccatgcggattttgcaaataatgaaacacagactaaatgtatgtccctcaagcaagcttattattttatggctcataaatataatcatgatttatattctttctttgcagaatcattgcacaccggtgacaatacggggtaacgcctgtaataacccattatacagatcacaaatatgctctttaatcgttagcagtccaggtaattgtgacatttgagaatagttctgccctcgcccgcgaaaaccgcgcgatgaaaatgcagcgcacctttaaccgctctggcattcgccctctgcaccagaactgctccttcgagaattataaggtcgagtcgcaggggcagatgaacgccctcaaccaggcgcgccagtatgtggatgaatttgacggcaacattgccagtttcatctttagcggaaaacccggcacggggaaaaaacaacaatactgattaccctgctctctggcctgtgtctgatggaatcagcacatgcggaagagaaaacgttgacgccccagcagcaacgcatgacgacctgtaaccaacaggcgacatcgcaaagcctgaaaggggatgcccgtaaaacgtacatgagcgactgcctaaaaaatggtgcgacaaaacccggtgaaaaaagcctgacccctatgcagggtaaaattatgctccgcttcgcataacctcgcgagccagcaaaccagagctggctcacatttactttcggatattaacgtacacctttcgcataccttcgattagaataggaggcagttaattatcaggcaattcaatatgaactcatttgagcgaaggaataaaatcgttgacctcgtcaacgcacatggcagcgtaatgagttgctgcttatatttgtccggaaactgaaaaaaggaaatataggaatgccctcaataatttaaaaaaaaggaatggtttgggcagacaagagataaaattagttaacattagtgaaagtaactatattttgtttcttcaagaaatttcgcagctgaacggtagtcttttttgtgttgtaacagactcatattataataataaaagcttcgccatgctgttcattttcttctgctaaaagtacagctgctgcgagataagtaaatatactgcggctaaacccaccagtgaccaattgttcatataaatctaaaaactcccgaaaagctttctggtaatctgtaaagtgaatatctaatgttgctgccactacaaaacgatgataagactttaagtatgaaaacatccctacctgattctggatatattatccgattcaatcactttaaatgaggaaaatggatttatccctgaactttaccgttttgataatcttgaatgcctggagatgatgttaaagagaactccactggaggtttaaatgagtagatccgatagcgaagttgtagaaatggttaatgtttgcgatgtttttattgcaaatgaaaggaaaaggaatcgttttgtttagtccagggaagcatcgactggatttttccacagccgagactgcgtgccgcagctctgacagaaacgggtgtgcgacctgtcgcaacagcaatatcccgggtgggcattttgccgtaatgctcttcgacaaaacgcagctctttcagcgtccatgccgaacgatgattacggggtttattttttgtgtccatggttacgggcgaagcaatggaactccgcgatcgcgataatttgggttaccttcgacaatagtggtatcaccatgctcagggcaggaaactcgatcacctttacgggccacaccaatatcaccaaaaagcatggtcgttgagcatgacaatacggctccaccgtgcgtggttctgtcaccgagacgaataattccttgcatcagcattcctattgttacgcttagaataaaattctgtagctatagtgccacgttgtaacataggtgcagcacaccataaacgcccatttcttgtcacataataacgccatctcacaaacgctgcatttgctggtgctttgtctgaacacacagctcgaacccatgtatgatttacaacctggatattcgttctagctgttttaatgcgagtttttttgtcagcagtccaccattcaataactttgctttagtgcgtttgtaatcgtccagaatcctttgctcctgctcgttatacgctaccagaacgatgcaccctttcatgacctttaccgtgacctgctgtccggtatcaaaacccgccgcgcgcagccacttgccggaaaggatgatttttggcgtagatttgtcgtaaacattcgggcggtatcccacaattaacgaacgccatatctgatattccgtgggtcagttttagcagttttaacgtcaacgtcgctaacatgcggaatttttttgcgcccatgttcacgtttggaaaatactataaccaggatggaaaggtcttgttgcctttcgccgttcaggtccatcattctgtctgtgacggtttccatgtggccaggctgatcaacgagttacaagagttgtgtgataagctatcggctgttaaccgatcggtcgtaggttcgagtcctacctgcggagccatacagagaagtacccaagtggctcaaggggctcccctgctaagggagtagatcgctaacgcggtgcgagggttcgaatcccttcttctctgccatacatattggcccgttggtcaagtggttaagacaccgccctttcacggcggtaacacgggtctttagattgatacttgcgttaatatccctatcatggtgtgtacgacaagaaggacagtcccattcacgtaggtttagatttttaacgtctttattttgatatccacaacaagaacataattggctggaagcaaatgttttcgatacgacaatgacttgtttgccataccattttgctttgtattctaacatggatcgaaattgcgaccaaaagtgtttggttttggtaagtgttggcctgttgttttttctggtttgtgtctggtgattttaaccggatgcccgggcccgggagataggtttatcccccatgaaaccacttctgttagtaaacagggaaaaaacgtatgttttaacattacagatgctcagggttatcaacctgctgacataggaataaatccgcgcggaactcccgccaatagcgagcagcttctctttacctagcgaacggtatttgagacgccagtatcttttaccgttgggattaaccagcaggtaaagaccaccaccatcagcgagtttgtagggcttatctttaggttttgcagtttcaacctgacgagctgtcagcttcattgggggtacctctcagcagggggtacaattatacccccatccatacatatcacttctattcaaaatcctttcaagatgacctttgacaatcaccaacttaagtgtattttctgagtactcatcatccaactttgatgtttcaacctgcactgaaacaagctctttctctaatcgttcaagttgtcgccgaatatcactcggctcttcttgagcatgataagcatcaacaaaatgttccggtgggattgcatgtacgtaaatattcaattgccagctgtgttggggttatttcagtatccatgatctcctcgcttatgttcaaaacgtgaccagtatatcacaatcaggcggctaatttttgaccaaaagcaagacatccggaaactttacacaacggcgtcgtcagccttgatgaacaacacaggcgatcctgctcgtccaggatatcaatctgccacacctaactgtcaccaccaccgcgccctggacacgtcagtttaccaacctttccctggatgccatccgcatcaagctcagccttccggtccagtatctctataaagataatggcgatatggtgggcacggttaccgagtatgcgatcgatttatcaacggacggcagcgcctggaaaacggttgtaaacggcaagtttgacggaaagaccacccagcgcggatatgctgcgtatggccgaagcgctgaacaccaaagtggtgatcccgttccaccatgatatctggtcaaacttccaggccgatccgcaagagatccgcgtcctgtgggagatgaaaaaagaccgcctcaagtatggcttcaagccgttcatctggcaggttggcggcaagttcacctggccgctggataaagacaatccgccacgccaccatcaggctcatcaggaagtcccgagagtgaagaccaggtgccggataccagcgccatcacggcacaaagccggatggcgctcagatgcccgtcaaagaacaccgggatcagcgccggtaaacgtgcatccgtctggtacatcaccgccccggcggtggcggcggtccggatgaagtcaccacgcaggggctgtgaatgttatctttgaactccgcgaccggaacggctttaatggttacttcgactccttttttctgcgcggcatctttcatacgttgaaccagcatgctggttgacattcccgctgcacagcataaaacgatgttcttcatagtcagcctcgatctacatgtgtttattgataattatcccgtgcagactgcttcaacaaccgctttaccgaaaatcaatagctgcgccataaaatctccttctacacataattccttacaatagaagattgttagtcccatgaacactcaatcacattgacgaatcttttgcctgtgatttacgttacctttaatagcccaaaagtcttttttaactcatacacctgaattcaattctgaaagaagtgaaaatggcagcaaacaaatcaccaggagtcatcgagcacgtgcaccttgtagtccagcgggccggggtaatccatcttcatggcgtcccgaattgaaagcctgaccagctcaacatcttctgaataggttgcgataaaaagatcgaccttgatgggtcttgaggcttccgcgtcttcggagcgcaggcaatcattgatctcaatcgggggcggattttgcggcggatcgtcttcttaacgctgtaacaccgaataaatatcaaaatctgagcaatcatctacaactataatctccaccttttctttttgacaagaatcaattgaatctacagctctaagtaaagtatcaattctattataagatggaattacaacagagataccaaattctcttgttttcatattatactcacaaaaggtattgcacgcatatgagccgaaccattttgtcaatacggtaggggtaaacgaagagagcatcaggcaatatgtgcggcatcaggagaaaacggaactaatgcacgaacagcagatggaattgctagagtagaaactggaaggtaataatagcccccttacaggctgagggctccccataaatcagagctaataaatcagcaccatattacaataagttctggcatactttatgccgcttttttgctttgttttgaattaaaaaaacgataagatcttagttgtaaacacagtatatcgataattaattttacactggttctatatctagtgtcttaggctttttggttaaaagttgtacttctatagtttgtgagtctttatgcttcagctggtttggctttttcacgtttaaacctcactagtacgtgggatgtgatgcgctactggtgccactggacctcaaggtgttcaaggtaacacaggcgctaccggtgccactggacctcaaggtgttcaaggtaacacgggtgctactggcgctactggtgctactggacctcaaggtgctcaaggtaacacgggtgctactggcgctactggtgccactggacctcaaggtgttcaaggtaacacaggcgctaccgaatagagtattaagtaattgacaatgatcaaacctatagcaacaaatataaaatgaaaatattttttccagataaatattttctcatcattgttgatattacttttgagaaatattgaatcgtacaatgttatcaacattgttacaatgccgaatacattttgagtaattcttaactttactaattcatttgctggaatttcatttttaggtttctcatcaagcgtgacgctcgcctgccccttcagggaactgtcgttggcctgaaggttgagcgcgttcagttcgagctgtttgcgctcttcatgccacaccgcctgcatcgtgccctggccggcaatccccttcgcgggtaaatccgcgccggtcagctgccagttgagctgctgaacgtccgccgtcagctggtgcggcagctttcattgaaactttctcaagtttttctgcttcaagttgttctttaagagtatcaacttcctgcttcaacataccgtggtcaaattgaagatttttaactttaaagtcaacttcttgtattgattgaatagaaattgcaaccgagctataaagtgttacagcgtctttctgtggtgtggtgaatacatcgtcagatttgaaaatgaattaaagcaagtaaaccgtcaagctgaacaaaaagggatggataagttaaacaactctttaaaatccctacaggctgaatttcagtctatcacaacaggcatgggcggtttttctaatgcgacagaacaaacacgagctaaagtagatgttttatctcgtatggtagataaacaaaaagagaagtgacacaaaatatctaccagaagggttccgtctaactgtagcatttacaatacgcccctctacttcgcgacttttggcaaatcgaacaaggcctagtttcggcaactttattttgttccctacaacggcaatgttttcatttgtttgttttgtggtataagattgtacgttgttcttcttagatttaaagagcgcatgacggagtcaaagtccgttgccttaccgcttggctatagcccatcgaaataattatcttcttttcaaagacaaatgttattgtaccataatgtccaataaaaaacaactgctatatagcagaagttaaaatggcggtcccgaccggggtcgaaccggcgatctcctgcgtgacaggcagtctatggagaattgataagcgctgcttatcaatataagtttccgtgtttcgttttcgtttagttttgagagttcaattcagtgttgactcttaaatgaggatatgatataaataaatcctgcaatttgtatgggcctatagctcagctggttagagcgcacgcctgataagcgtgaggtcgataaggaacatttgtgcaaatgattattttaaacttacaggtgaatatccgccacaaaagttattaacaattgaaaataaaacgcaaatagagcaggagcagcaatagctggtctttttttattgctaaaaaagaccaactatgagaagtcaagaggaattttataaataggaaattaaaaaaactcctagtgtcaaggcatccaccgtgcgccctttctaacttaaccaaactaaaattaaaaaatatgagctacactgttatctagttttcaaagaacataccatttgctatttaaaatagctttttggtggagcctagcgggatcgaaccgctgacctcctgcgtgcaaggcaggcgctctttctttattggaaatgagttgctttcacttttagaaaatgcagggcgtatgggagtacctttgccttcagctttaacaaatgcagttgaaattttgggtggaaaacaaaaacaagaagagaaaaagaccaactatgagaagtcaagaggaattttataaataggaaattaaaaaaactaatagatcgaggacttaaccatataatatgtagcaatgttatctagttttgagagaatataaaaaacttgttgactttaaaatttaaataagttaaaatgattcttgtcttaaatgaatacagtctggtaatgatggcagagaggtcacacccgtctaatagatcgaggacttaaccatataatatgaagcaatgttatctagttttgaaagaatataaaaaacttgttgactttcaaaagtgaatgagttacaataattcttgtcttaaatgaatacagtctggtaatgatggcagagaggtcacacccgtttttacgcataagatatgcttgttcttctgttggatacaaacggaatttatatgctttatcatatcattttacctcacttttcaccttgattttgggtgtttttgcccatccccccgaaaagggggaataaggacaacaatactttatcaattctaataagattcgtatcaatgccttttgcagttaaccatttcaccattgtctcggcattaatggctacctttgaaacatcaatttctaatttttccgatgaaaagttaatagctgcgatgatattcccttttttaactttaagggggagcaaaagctctctcttttttattaacgaggaggaaaagccatgaaattaacactaataattaaggaagaaaagaaaacttttcatttaccggagtttattccagcacgtttaattcgtcaagcacctgaactttttttgttccccattcgtcttggaataggaaatctagcattttaacagttacaccgtctttatcaatggttatcttatcaccgtcaattctaataagattcgtatcaatgccttttgcagttaaccatttcaccattgctgataacacagactcattaaaattcaatgatgttccagcaaatcactggtctacgaaagcaatttatgatttaacaaaccgtaaagtagtgcaagggtacggaaataatatctttggctttggtgacaatgtaatatttgctggaggtgtcgtatttccttgacctcctccgttatttgctggaggtgttgtatttccttgacctcctccattatttgctggaggtgtcgtatttccttgacctcctccgttatttgctggaggtgacgggaccaacgggagatacgggaccaacgggactaaccggagtaacaggaccaaccggagtaacgggaccaacaggagtaacgggaccaaccggagtaacaggaccaaccggagatacgggaccaatcgctgcgaccttcgggttatgagcccgacgagctaccgtgctgctccaccccgcgatgataaaatattcactttagaaaaaatggaggaggtagagggattcgaacccccgcgcgactctcgccgcctgtcccaagaaatacccgcaaaagccaccgaaagtggcaataaaggtttttaataatacctcaatacgacccatcttttcatctcctcgtatgattaagttaggtttttagggacgggatgtacctataaatccctgccttacaagcagggggtcggcggttcgatcccgtcatcctccaccatataaattttatatgaatagtattatcgcggggtggagcagcacggtagctcgtcgggctcataacccgaaggtcgcagcacgaatgccggagccacaatccggtgcgttaaccacttcgccacaaccgccatgttgtgtaaatatatttggcaggggcagtaggaatcgaacccacactggaggttttggagacctcagttctacctttttttcatgttttgacaagttgcggtgagataagcctgcatttggacagacttcagcccctaaatcgagcatatcgatagccatgtagttctttggcgtccgcaaagcttcgctctatagttgaacttctcttcctgtatttcttagtttgttttgtaattcgatttctcgttctgctgtctgtctttcgcctttcacattgccttgctgtccttcttctcttcctgtatttcttagtttgttttgtaattcagaggactgaaaatcctcgtgtcggcggttcgattccgtcccgagccaccatttattttaataaaatacgccggcttagctcaattggtagagcaactgacttgtaatcagtaggttgggggttacccatctactaatttccctatacctatctgcatttcacctgttttgctatttagtgtatttaaaccatttgttactttgcctgacccatctactaatttccctatacctatctgcatttcacctcagaatgtatgcccacaagatttagttgatacgtataaccaaagtcagaatgtatacacacaagatttaattgatacgtataaccaaagtcagaatgtatgcccacaagatttagttgatacgtagaccttcgggttatgagcccgacgagctaccgtgctgctccaccccgcgacaatactattcatataaaattatatggtggaggatgacgggatcgaaccgccgaccccctgcttgtaaggcaggcgttggtcccgtatctccgattggtcccgtatctccggttggtcctgttactccgatcggtcctgttactccggttggtcctgttactccggttagtcccgttactcctgttggtcccgtatctaccgctgacctcctgcgtgcaaggcaggcgctctcccagctgagctaaggccccatgttttttgggaatatcgggaagacaggatttgaacctgcgaccccctggtcccaaaccaggtgctctcaattacttcagcttcttctgactcttctgtttctgtaattacttccacttcttctagctcttctgtttccgcaattacttctacttcttctagctcttctgtttctgtaattacttctactcccgaaggagcggatttacagtccgccgcgtttagccacttcgctacccctccgaaacttacatggtgccggctagaggacttgaacccccaacctactgattacaagtcagttgctctacggtccagtggcaccagtagcgcctgtgttaccttgaacaccttgaggtccagtagcaccagtagcgccggtagcgcctgtgttaccttgaacaccttgaggtccagtggcaccagtagcgcagcaactgacttgtaatcagtaggttgggggttcaagtcctctagtcggcaccagtttttattgtaagagccattagctcagttggtagagcatctgacttttaatcagagggtcgaagagaggactgaaaatcctcgtgtcggcggttcgattccgtcccgagccaccattttgaaatcacgagccgacttagctcaattggtagagcaactgacttgtaatcagtaggttgggggtccttcgaccctctgattaaaagtcagatgctctaccaactgagctaatggctcattttgaaagtggtgccgactagaggacttgaacccccaacctactgattacaagtcagttgctcaactctcgaccagagcttggaaggctcttgttttaccactaaactacacccgcattaaattgtaaatggtgagccatgaaggactcgaaccttcgaccctctgattaaaagtcagatgcctgccttacaagcagggggtcggcggttcgatcccgtcatcctccaccatatatatttaaaatgtcggaggggtagcgaagtggctaaacgcggcggactgtaaatccgctccttcccgccgacacgaggattttcagtcctctgctctaccgactgagctaccgagcctttatgtaaaaaatggcggtcccgaccggggtcgaaccggcgatctcctgcgtgacaggcaggcaaaatggaataggtaaaggagcattacacatgttaacaaaaatgaagaattggttaaaaaacgaagactcacaattatcatcagaaaacggtatgttaatcgcgttagcggtgattacagaagtgaagccagacccaaaaccagaagaaaaaccagaagtgaagccagatccaaaacctgaagaaaaaccagaagtgaagccagacccaaaaccagaagaaaaaccagaagtgattcgggttatgagcccgacgagctaccgtgctgctccaccccgcgacaatataaagttttaaaaaatggaggaggtagagggattcgaacccccgcgcgactctcgccgcctgtctgtactgttgctgctcctgcccttgcagtatgctctaccgcttcatttcctcttacattattttgtacatttacatctcgttgtactgttgctgctcctgcccttgcagtatgctagcaactgacttgtaatcagtaggttgggggttcaagtcctctagtcggcaccagaaatcatggcggttgtggcgaagtggttaacgcaccggattgtggctccggcattcgtgagagcacctggtttgggaccagggggtcgcaggttcaaatcctgtcttcccgatacttgtttggggccttagctcagctgggagagcgcctgccttgcacgcaggaggtcagcgaaaacaagagccttccaagctctggtcgagagttcgattctcttcacccgctttttaattatgggcctatagctcagctggttagagcgcacgcctgataagcgtgaggtcgatagcgcatgacggagtcaaagtccgttgccttaccgcttggctatagcccattaattaagaatggtggaggggggcagattcgaactgccgaacccgaaggagcggatttacagtccaggaactggagaagaaacaaacccaaacgcgtagagggaggggggctaacgtttagtgagtttatggacgagctctacctctctttattacgtcaggggtataaacaccatccgctgacctcctgcgtgcaaggcaggcgctctcccagctgagctaaggccccaaaatgtatggtgggcctaaatggactcgaaccatcgacctcacgcttatcaggcgtgcgcctacttcttctagctcttctgtttctgtaattacttctacttcttctgactcttccgcttccgcaattacttctacttcttctagctcttctgtttctgtaattacttctactctgtaaatccgctccttcgggttcggcagttcgaatctgcccccctccaccatttacataggggcatagtttaaaggtagaactgaggtctccaaaacctccagtgtgggttctgcctgcctgtcacgcaggagatcgccggttcgaccccggtcgggaccgccatttatgttggctcggtagctcagtcggtagagcagaggactgaaaatcctcgtgtcggcgggcgccgatggtagttgggaccttgtccctgtgagagtaggacgttgccaggcaatccggaggattagctcagctgggagagcacctgccttacaagcagggggtcggcggttagcacctgccttacaagcagggggtcggcggttcgatcccgtcatcctccaccatttagccgacttagctcaattggtagagcaactgacttgtaatcagtaggttgggggtcgaccgatcggttaacagccgatagctctaccactgagctactgcggaataatattagcctggcaacgtcctactctcacagggacaaggtcccaactaccatcggcgctagcaggcaaagtaacagatggtttacatgcattaaatagcaatgcaggtattgggaaactagtagatggatcaggcaaagtaacagatggtttacatgcattaaatagcaatgccaacggactttgactccgtcatgcgctggttcgaatccagctagcccagccatttacgagccattagctcagttggtagagcatctgacttttaatcagagggtcgaaggttgtggaagtaattacagaaacagaagagtcagaagaagctgaagtaattgcggaagcagaagagtcagaagaagtagaagtaattacagaaacagaagagctagaagaagtagcgaatgaaacagcaagtaacgctaagaaagaatcagaagcagcgaaaacacttgctgaaaaggtacaagagaatattaaaaacaatactgttgaaattatagaagctaagaatgaagatttttaactttaaagtcaacttcttgtattgcttgaatagaaattgcaaacgagctataaagtgttacagcgtctttctgtggtgtggtgaatacatcgtcagagcttctactttcttctgttcttctgctttcttctgttcttctactttcttctgttcctctgctttcttctgttcttctactttcttctgttcttcggctttcttctgttctttttcaattaatggaaaaccgtagagtttctatccttaagttgatgggcatgtgttagtaccccatccctatcaagctaatagttttaattaccccataacgaaatttttaggtagagcatctgacttttaatcagagggtcgaaggttcgagtccttcatggctcatcatttttgcggaagtagttcagtggtagaatacaaccttgccaaggttggggtcgccgccgacacgaggattttcagtcctctgctctaccgactgagctaccgagccttattaaaatggcggtcccgaccggggtcgaaccggcgatctcctgcgtgacaggcagtggaccttgaattccttgcgggccttggattccttggggaccttgaattccttggagacctgtcgctccggttgctcctgtagctcccgttggaccttgaattccttgcggaccgccgaccccctgcttgtaaggcaggtgctctcccagctgagctaatcctccatttgcctggcaacgtcctactctcacagggacaaggtcccaactaccatcggcgctgttaacctagattagtgctatttaatcaattctaaatctacccttatgggcgcacgtataaatgctaacttaaatatgtacattaacgcttgaataaatatgtacattttaaaataaaaattgacgtttcacgttgtttgtttcgttcagttttcaaagaactaatggtggagcctagcgggatcgaaccgctgacctcctgcgtgcaaggcaggcgctctttctttttttatttggtatatgctttacttgtaatcgaaaataaagcactaatagggtgtttttgcccatcccctcgaaaagggggaataagaaaaaataggatgtttttgtctaatacctgatgtgtatccctgaacagtgttctcagttttattctcttgttgggtgtttttgcccatcccctcgaaaagggggaataagaaaaaataggatgttttcgcgctcttcgggagtggttgtaggagattcttttcctgttttagggcaaacactcatgcccatcaacttaagaatttgcactacccccaagtgtcaaaaaacgttattcgcaacggactttgactccgtcatgcgctggttcgaatccagctagcccagccattaagagccattagctcagttggtagagcatctgacttttaatcagagggtcgaaggattttgtacatgcttaaacaagcgaaaatgtacatgtttatcttgacatttacacaaaagcacgttctattgtagaacgcgcttttcctgaatgagtctatactaataattctcccgattggactttcaccaactagataatgtgtccttatctggacacgccgatctgccagcggagggagtaaaaatcatggatttgttccatcggaaccacttctttaacagcggtacaggcaaatcaattttcttttgcactaaatggtacaccaattgttcttgtaatcgctcctaagtcaccgactgttcgtaagtctaggtgcataaaaatagcttccaatatttatctggaacatctgtggtatggcggggaagttttttttaaacactgttttctttttgttttggatgaaaacattccgctggcagcttaagcaattgcttaagctgccagcggaatgttttcatccaaaacaaaaagaaaacagtgttttaaaaaaacttccccgccataccacagatgttccagataaatattggaagctatatagcttccaatatttatctggaacatctgtggtatggcggggaagttttttttagacactgtttactttttgtttaggatgaaagcattccgctggcagcttaagcaacctgccttacaagcagggggtcggcggttcgatcccgtcatcctccaccatatatgtcggaggggtagcgaagtggctaaacgcggcggactgtaaatccgctccttcaaaacaagagccttccaagctctggtcgagagttcgattctcttcacccgcttttagttctttgaaaactgaacgaaacaaacaacgtgaaacgtcaatttttattttaatgtacatatttattcaagcgttaatgtacatatttaagttagcatttatacttttgtattatacacctaaataatcttaataatgagaatattaattatcaatttcttaagctgccagcggaatgttttcatcctaaacaaaaagaaaacagtgtcttaaaaaaacttccccgccataccacagatgttccagataaatattggaagctatataagccaatgactcctgataagccaatggaaaaggaagacatgaagcctgataagccaatgactcctgataagccaatggaaaaggaagacatgaagcctgataatagtttgccaatgatgaatttgaaatagagatttccacgttttaaatatgatttgtcgggtaaaagactggcgcggtatcagttgtgatccgtttccagcctctcgcggaggaaatcacatggatgttgcaaaacagttttcttcttatcttaaacaagagaataaaactgagaacactgttcagggatacacatcaggtattagacagtgcggctggatcacctcctttctatggagaattgatgaacgctgttcatcaatataagtttccgtgtttcgttttgttcagttttgagagaactatctctcatattagtatagactcattcaggaaaagcgcgttctacaatagaacgtgcttttgtattatacacctaaataatcttaataatgagaatattaattatcaattttcaattaatggaaaaccgtagagtttctatccttaagttgatgggcatggggtaccgccagcatttcggaaaaaaaccacgctaaggattttttctataaaaaaaaaaaaatttttttttttttttttaaaaaaaaaaaaaaaaaaaaaaaaaaaaaatttttttttttttttttaaaaaaaaaaaaaaaaaaaaaaaaaaaaaagacttttgacctgctataacaggtctttttttgcatctcgtacgcaacatgtgtttctattagatcaccagccccaactggtggtttctctttatcattctgcaaatcaagttgattgggaaactggtcagataaaatccaaataccaagtaatgaaagatgatgtcgttcaaaagatgaaagaaacttggtcaggtataaccttaagctgccagcggaatgttttcatcctaaacaaaaagaaaacagtgtcttaataaaacttccccgccataccacagatgttccagataaatattggaccttgaattccttgcgggccttggattccttggggaccttgaattccttggggacctgtcgctccggttgctcctgtagctcccgttggacagctttatggttagcttcttcctgagctttacgttgagtctcttcttgagctttatggttagcttcttcctgagctttacgttgagtctcttcttgaggaaatgaagcggtagagcatactgcaagggcaggagcagcaacagtacaacgtgatgtaaatgtacaaaacaatgtaagaggaagtgaagcgcgggaccaacgggactaaccggagtaacaggaccaatcggagatacgggaccaacaggagtaacgggactaaccggagtaacaggaccaaccggaaaaaccaaggtgaccaagacgataaaacgctagatgggaaaaaccaaggtgaccaagacgataaaacgctagatgggaaaaaccaaggtgaccaaaaacgaaacacggaaacttatattgataagcagcgcttatcaattctccatagaaaggaggtgatccagccgcaccttccgatacggctacctctgttccttcacctggtttttctgttccttcacctggcttttctgttccttcacctggtttttctgttccttcacctggtttttctgttccttccttaaataatgccagatatccatttcgttatcgatatgatggtgtttatacccctgacgtaataaagagaggtagagctcgtccataaactcctgttactccggttggtcccgttactccggttagtcccgttggtcccgtatctccgattggtcctgttactccggttagtcccgttggtcccgcatcgttatttaccgcttcacttcctcttacattgttttgtacatttacatctcgctgtactgttgctgctcctgcccttgcagtatgctcttctgccatcatcaccaaactattgaaggcatattccttcaaaactagataacattgcttcatattatatggttaagtcctcgatctattagcatcgttatttaccgcttcacttcctcttacattgttttgtacatttacatctcgttgtactgttgctgctcctgcccttgcagtatgctccaaggaattcaaggtccccaaggaatccaaggcccgcaaggaattcaaggtccaacgggagctacaggagcaaccggagcgacaggtcagtaacaggaccaaccggagatacgggaccaatcggagatacgggaccaacgggactaaccggagtaacaggaccaatcggagatacggtcggaggggtagcgaagtggctaaacgcggcggactgtaaatccgctccttcgggttcggcagttcgaatctgcccccctccaccattttccgtgttcggtatgggaacgggtgtgacctctctgccatcatcaccaaactattgaaggcatattccttcaaaactagataacatttgtggagctgacgaatactaatagatcgaggacttaaccatataatatgtagcaaatgttatctagttttgaaggaatatgccttcaaaaaagaaaatgtaggaaatatagtgtcgccgcaagtgaaaaaagaaaatgtaggaaatatagtgtcgccgcaagtgaaaaaagaaagtagcacactacagtttactgcgtaaacccgtgtgcccttcgggacatttcggctaccgccgagccataacaagcatggcaaaagtagcacactacagtttactgcgtaaacccgtgtgcccttcgggacatttcggctcccgccgagccataacaagcatggcaaaagtagcacactacagtttactgcgtaaacacgtgtgcccttcgggacatttcggctcccgccgagccataacaagcatggcaaaacaattaattacggtatgattgcggaggactctgacgatgtattcaccacaccacagaaagacgctgtaacactttatagctcgtctatggagaattgataagcgctgcttatcaatataagtttccgtgtttcgttttgttcagttttgagagaactatctctcaagccgaaatgtcccgaagggcacacgggtttacgcagtaaactgtagtgtgctactgtttacatggaactacccccgaaaaagccagcggaatgctttcatcctaaaccaaaagtaaacagtgtcttaataaaacttccccgccataccacagatgttccagatatctggaacatctgtggtatggcgggtaagttttattaagacactgtttactttttgtttaggatgaaagcattccgctggcgtgggtttgggcaaagcccatgattttttttgccatgcttgttatggctcggcgggagccgaaatgtcccgaagggcacacggccagcggaatgctttcatcctaaacaaaaagtaaacagtgtcttaataaaacttccccgccataccacagatgttccagatgtgtttattatcgtaaagctaaaaatgctgaagagtttccgcgtattacgttttttgaactagacaatagaccagatggatgtgacatgtggagctgacgaatactaatagatcgaggacttaaccatataatatgaagcaatgttatctagttttgaacttaaccatataatatgtagcaaatgttatctagttttgaaggaatatgccttcatagtttggtgatgatggcagagaacgggccaattactaatacgataatcaccgctaacgcgattaacataccgttttctgatgataattgtgagtcttccttaaccatataatatgtagcaaatgttatctagttttgaaggaatatgccttcaatagtttggtgatgatggcagaattcttgtcttaaatgaatacagtctggtaatgatggcagagaggtcacacccgttcccataccgaacacggaagttagtcccagtgccaccagtaggccccgtaggtccagtagtcccagtgccaccagtaggccccgtaggtccagtagtagaagaacagaagaaagcagaagaacagaagaaagtagaagaacagaagaaagccgaagaacagaagaaagtaggtgaaggaacagagaagccgggtgaaggaacagagaagccgggtgaaggaacagagaagccgggtgaaggaacagaaccagaagtgaagccagacccaaaaccagaagaaaaaccagaagtgaagccagacccaaaaccagaagaaaaacgaggcggaacgggaacagacaacggaaccggaggaaacccaggaggcggaacgggaacagacaacggaaccggagaacctgagactaagccagaggtgaagccagaggaaaaacctgagactaagccagaggtgaagccagaggaaaaactgacccgtacgggattcgaacccgtgttaccgccgtgaaagggcggtgtcttaaccacttgaccaacgggccaaagcggaagacgggattcgaacccgcgaccccaaccttggcaaggttgtattctaccactgaactacttccgcaatttgatctttcggatgtaaccaaaattctgtagctatagtgccacgttgtaacataggtgcagcacaccataaagaggaaatgaagcggtagagcatactgcaagggcaggagcagcaacagtacaacgagatgtaaatgtacaaaattaagacactgttttctttttgtttaggatgaaaacattccgctggcagcttaagcaattgctgaatcgagactatttgctggaggtgtcgtatttccttgacctcctccgttatttgctggaggtgtcgtatttccttgacctctatggctgctctggtttctcatttattaattgttgtactaatacctttaattcataaatttcagctttcattcacctccagcaaataacggaggaggtcaaggaaatacgacacctccagcaaataacggaggaggtcaaggaaaaacagtgtcttaataaaacttccccgccataccacagatgttccagataaatattggaagctatatacgaaggaacagaaaagccaggtgaaggaacagaaaaaccaggtgaaggaacagaaaaaccaggtgaaggaattccttcacctggtttttctgttccttcacctggtttttctgttccttcacctggtttttctgttccttgaagagtcagaagaagtagaagtaattacagaaacagaagagctagaagaagtagaagtaattgcggaataatcaccgctaacgcgattaacataccgttttctgatgataattgtgagtcttcattttttaaccaaaaaacaggtttaatttatgagagtggtgattatccgaatacatggaatcagtattttggtcgattgtcacaagatttagttgatacgtataaccaaagtcagaatgtatgcccacaagatttagttgatacgtatgaagccagaggaaaaacctgagactaagccagaagtgaagccagaggaaaaacctgagactaagccacgggaccaacgggagatacgggaccaacgggactaaccggagtaacaggaccaatcggagatacggatacgtataaccaaagtcagaatgtatgcccacaagatttagttgatacgtataatcaaagtcagaatacgtataatcaaagtcagaatgtatgcccacaagatttagttgatacgtataaccaaagtcagaatacgtataaccaaagtcagaatgtatgcccacaagatttagttgatacgtataaccaaagtcagacaattcagcaattgcttaagctgccagcggaatgctttcatcctaaacaaaaagtaaacagtgtctcgattcagcaattgcttaagctgccagcggaatgttttcatccaaaacaaaaagaaaacagtgtttttgcttaagctgccagcggaatgctttcatcctaaacaaaaagtaaacagtgtcttaataaaacttcaattggtagagcaactgacttgtaatcagtaggttgggggttcaagtcctctagtcggcaccaccaaaaccagaagaaaaaccagaagtgaagccagacccaaaaccagaagaaaaaccagaagtgacaacaggagcaacaggagcaacaggagcaacaggagcaacaggagcaacaggagcaacaggagcatgtaggaaatatagtgtcaccacaagtgaagaaagagaatgtaggaaatatagtgtcaccactttatatatgagagatagttctctcaaaactgaacaaaacgaaacacggaaacttatattgatacaaagtacgtatatagcttccaatatttatctggaacatctgtggtatggcggggaagttttgaagaaaaaccagaagtgaagccagacccaaaaccagaagaaaaaccagaagtgaagccagaaagggacagaagaagtaacggaagaagaaaaagcgaaagccaaggcaaaagcggcggcgttatgcatttgcttgtccgatggggtgtattttagagtatgcgacaacggatcgtgaaggatatcccaggtgaaggaacagaaaaaccaggtgaaggaacagaaaaaccaggtgaaggaacagaaaagttggtcccgtatctccgattggtcctgttactccggttagtcccgttggtcccgtatctcccttccgcaattacttcagcttcttctgactcttctgtttctgtaattacttccacttcttcacttgaacccccaacctactgattacaagtcagttgctctaccaattgagctaagtcggctatatttatctggaacatctgtggtatggcggggaagttttattaagacactgtttacttttctgggtttcctccggttccgttgtctgttcccgttccgcctcctgggtttcctccggttccccgaaggagcggatttacagtccgccgcgtttagccacttcgctacccctccgacatcgttgtactgttgctgctcctgcccttgcagtatgctctaccgcttcatttcctcttacgagatgtaaatgtacaaaacaatgtaagaggaagtgaagcggtaaataacgatgtaaaaccttcgaccctctgattaaaagtcagatgctctaccaactgagctaatggctcttaagcacctgccttacaagcagggggtcggcggttcgatcccgtcatcctccaccatatattatacgtatcaactaaatcttgtgggcatacattctgactttggttatacgtatcaacgtatatagcttccaatatttatctggaacatctgtggtatggcggggaagtttttttaaggctcggtagctcagtcggtagagcagaggactgaaaatcctcgtgtcggcggttaccgctgacctcctgcgtgcaaggcaggcgctctcccagctgagctaaggccccaaagtagagcacctggtttgggaccagggggtcgcaggttcaaatcctgtcttcccgatactttacggttagcttcttcctgagctttacggttagcttcttcctgagctttacggtcgccgcctgtcggttttcaagaccgatcccttcagccgaacttgggtatacctccgaatatagcttccaatatttatctggaacatctgtggtatggcggggaagtttttttaagagagcgcctgccttgcacgcaggaggtcagcggttcgatcccgctaggctccaccattaaaatggcggtcccgaccggggtcgaaccggcgatctcctgcgtgacaggcaggcacagcagaacgagaaatcgaattacaaaacaaactaagaaatacaggaagagaagaataaaaaaaacttccccgccataccacagatgttccagataaatattggaagctatatacacctccagcaaataacggaggaggtcaaggaaatacgacacctccagcaaataaaaaaaaaaaaaaaaaaaaaaaaaaaaaaaaaaaaaaaaaaaaaaaaaaaaaaaaaatggggccttagctcagctgggagagcgcctgccttgcacgcaggaggtcagcggttcccccccccccccccccccccccccccccccccccccccccccccccccccccccccctgcgaccttcgggttatgagcccgacgagctaccgtgctgctccaccccgcgattgcctgcctgtcacgcaggagatcgccggttcgaccccggtcgggaccgccattttttatatggtggaggatgacgggatcgaaccgccgaccccctgcttgtaaggcaggtactgtaaatccgctccttcgggttcggcagttcgaatctgcccccctccaccatttgacattcccatctcctgaaaaataatagataaatttcggatgtctttacgtgttaactggtgccgactagaggacttgaacccccaacctactgattacaagtcagttgctctaaaataaaaattgacgtttcacgttgtttgtttcgttcagttttcaaagaactaaacctgccttacaagcagggggtcggcggttcgatcccgtcatcctccaccatatatttatcaggcttcatgtcttccttttccattggcttatcaggagtcattggcttatcttttctttttaaatctatacagttactcataaatttcgtactgtgtaactcaaaagccggtagcgcctgtgttaccttgaacaccttgaggtccagtggcaccagtagcgcc
